United States Patent Application Publication US 2013/0129668 A1 - sequence listing, part 29

SEQ ID NO: 483677 - DNA, 122 bp, Homo sapiens
ggtgggttcgtggtctcgctggctcaggagtgaaactgcagaactttgctgtgagtgttacagcccttaaggtggtgcatagcactagcaagatttattgcaaagaacaaagcttccacagt

SEQ ID NO: 483678 - DNA, 122 bp, Homo sapiens
gcaggcctctgatgatcccatatgaattcgtatggttcatgtcctagaaagaaagaactacaattcttaagaatgtgagccatgccccaggattctccagagttaacctcttttgttctccc

SEQ ID NO: 483679 - DNA, 122 bp, Homo sapiens
catccacctgcctcgaagtgatccatccgcctgcctcggcctcccaaagtgctgggattacaggcctgagccaccatgcctggcaccaaggaaggaatttttgatacaggccataacaccgg

SEQ ID NO: 483680 - DNA, 122 bp, Homo sapiens
gccacttcccatacctcgcactatgcatctcttcatccatatcctttgtaataccctttacagtaatccagtaaacatgtttccttcagtcctgtgagctgctctagcaaattaattgaacc

SEQ ID NO: 483681 - DNA, 122 bp, Homo sapiens
tcaagatttgctaataggttgagtacttgtgtgtagcctgttgctccacaggagtccctacaagctgatatggcagaaacaatgctgtatgtgaaataaagatcaaggcaacagtcttgccc

SEQ ID NO: 483682 - DNA, 122 bp, Homo sapiens
gcatagcggcccagggtgcaggacgggggccaggacgggatgcagccctgccttggcctacagccaggtggcaatggtgtcagaaggccctagactttccagtcccaatcctcaagtccagg

SEQ ID NO: 483683 - DNA, 122 bp, Homo sapiens
cttttcatggcaaaagggacattgccagtgtgaccgagggtcctgcgatgggagactccccaggatcatgcaggtgaacccaatggcattacaagggcccctgtgagagagaggcgggggtc

SEQ ID NO: 483684 - DNA, 122 bp, Homo sapiens
cctgcaggtaacaagactcccaggtggcactgctggccgagcgggaggagcacgagactacaggcccaggcagcttaatgagttcctggcaaggaggaaccagatacaggtgtgttcagggc

SEQ ID NO: 483685 - DNA, 122 bp, Homo sapiens
ggtcgcaaactcgtggaccaggtgacctgcccacctcggcctcccagagtgctgggattacaggtataagccactgcacccagccctatttgtgacttgtctgtgttgtatttaaatattaa

SEQ ID NO: 483686 - DNA, 122 bp, Homo sapiens
acttcaaactcctagcttcaggtgatcccccaaccttggcctcccaaagtgctgggattacaagcatgagccaccacaactgtcagtttcttaggtttttctgtgtactcaatcatgttatc

SEQ ID NO: 483687 - DNA, 122 bp, Homo sapiens
atgaagtgacagttcaacctccaggtgaggatcaagctcattataatttgcccaagtttacagtcaaacctgcagatgtggaggttaccatgacttcagagcctaaaaatgagacagaatct

SEQ ID NO: 483688 - DNA, 122 bp, Homo sapiens
tatatggtctatacccccacatacacaagcacacacatagacaccaccttcccacctttacagggctctacattaacatttgctctaatgtggtgaggcttgaaaatattttaaaattaagc

SEQ ID NO: 483689 - DNA, 122 bp, Homo sapiens
gtctcaaactcctgacctcaggtgatctgcccacctcagcttcccagagtgttgggattacaggcatgagccactgcacctggcaagtttgcatttttaaaatgatcactctggccttagta

SEQ ID NO: 483690 - DNA, 122 bp, Homo sapiens
tgcacacacatacactcattctggctcatctcagaggattctgggcccctgaagcccttacaaggcctgctgaagaatctcagaactcaaggtgagagatcatccttaaccacatggccaga

SEQ ID NO: 483691 - DNA, 122 bp, Homo sapiens
ataaaagattaatgtgtgattccactcatataaaactctagaagaggcaaaaggaatatacagcagtagaaatcagaatagcagttgcctctgagcaggggcagggtgaggactgaatggaa

SEQ ID NO: 483692 - DNA, 122 bp, Homo sapiens
acatgagaggaaacattgcagtacagagtattaggagaaataaatacaagtgtgcaattacaatcacagcaaaggcagcaccaaaaatagtcatggaggccttagaaacaaacatgatagcc

SEQ ID NO: 483693 - DNA, 122 bp, Homo sapiens
tgttgattatggatattaggagttgagctctcatgatcccaaaaggatcataacaatttacaatagagtctgctttatgatacttggaacaatgggttaaaatttgcacacaaatattttcc

SEQ ID NO: 483694 - DNA, 122 bp, Homo sapiens
ggtaaagtctttgagggcaagttgtatgtccattttattattacagtcttctatggtttacagcattgtgccttgcagagtatctctggagtccctgattgaagcagttctctttggattgt

SEQ ID NO: 483695 - DNA, 122 bp, Homo sapiens
acaggcccccaaccgtctcttataaattaccaaccgtttaaaaactttgagcctggattacagccaagataagcaatgaaataaaaaatagtacacattatactgagagaggggcctggcta

SEQ ID NO: 483696 - DNA, 122 bp, Homo sapiens
ccaaagcgtgtcacataaatgcaaggtaacagtcaacatgcatgaaggacagaatgcttacagcactaactctatatgtctgtgggtgaaatcactgcacacaaatattgatgtcaaagaca

SEQ ID NO: 483697 - DNA, 122 bp, Homo sapiens
atagagaatgagatgccattgaagcaattcaacagggatggcatgacacggtcaacctcacagtccattaactcagagggaacttccaatgtcaacagctttctgggctcttggaaaactgt

SEQ ID NO: 483698 - DNA, 122 bp, Homo sapiens
gcaaagattctaatttctccagatcctctccagcactcgatattctatattttaaaattacagccaacctagtggtgtatggtgatgtctcatagagatttgcacttccctctggtctaagg

SEQ ID NO: 483699 - DNA, 122 bp, Homo sapiens
gccaaaagaacaaagctggaggcatcatgctacctgacttcaaactatactatgaggctacagtaaccaaaacagcatggtactgataccaaaacagagatatagaccagtggaacagaaca

SEQ ID NO: 483700 - DNA, 122 bp, Homo sapiens
gtctcgaactcacgggctcaagggatcctcccacctcggcttcccaagtagctaggagtacagcacaggccaccatgcccagcaaattttgtatttttgctagagatgaggtcttgctatgc

SEQ ID NO: 483701 - DNA, 122 bp, Homo sapiens
gccacagtcatcaggcatggctgtcaccaaggcaggcgtcacacattctaataatgtttacatcacttttgtggggcaatattctcatcagaaagtacctcacacaggtactaggaacagag

SEQ ID NO: 483702 - DNA, 122 bp, Homo sapiens
aatttgtaaaactaaagactttttgaaaaaaagctatcttaagtgctttttctttatttacaagacatttcccccagtggtagcatctgaagtattggagtgtttctgccacgaagcaaagc

SEQ ID NO: 483703 - DNA, 122 bp, Homo sapiens
tgccgggattacaggtatgagctaccacacccagcctcaacttttcttgaaataatagtacagtcttctgagtctagaaaactaataaccaaaaatattctgggcaaagggaaaaaaatcca

SEQ ID NO: 483704 - DNA, 122 bp, Homo sapiens
cctggacttaggcacactatcaagaggtcctgggaacatgtgtccaaggtgctggggttacagctcaatgttatacattttagggacacagaagttcagacaaaagttatacatcttaggca

SEQ ID NO: 483705 - DNA, 122 bp, Homo sapiens
atagcacactgttttaattccggtagctttgtagcttgagtggctattcagactgttttacagctcttctcaggggaggagtatgtctgattgcctttgcactagggcttccctaagccaaa

SEQ ID NO: 483706 - DNA, 122 bp, Homo sapiens
gcaatacctataagaaacataagggaaaaaacgtgtaagccaaagactgtaaacatactacaccatgtcacagccagatgatcttcaaatttgctttgggctggatgactggtaatacatct

SEQ ID NO: 483707 - DNA, 122 bp, Homo sapiens
acactgttgtactgcagagtaagtttccaatacagaaatttgggagacacattcagattacagcatccacttagtgattgagggtagtgcccagaatacaatcaacatggaataatcaatac

SEQ ID NO: 483708 - DNA, 122 bp, Homo sapiens
aagccattccctcagacacataaatgtgccccagctataaaactccaacatacaatgttacagcaaccaaaggatgaggattcacattagagggtaatgcaccaagagtccatcagataaca

SEQ ID NO: 483709 - DNA, 122 bp, Homo sapiens
acatcctgattctgaattatttttgcccacgttatttcccaggactgagttgagtagttacaggcagatgtttaggcattgggtcacatggatgtggaatgttatgctacctttgacttatt

SEQ ID NO: 483710 - DNA, 122 bp, Homo sapiens
gaaaggaaaatcaacttcagcttagctgttttatcaatcaggaagtcaagtatctttttacaggacttaaattggtaaggacaatctcagtccatccttgttgtttgtgaattccatgtttg

SEQ ID NO: 483711 - DNA, 122 bp, Homo sapiens
tagtttaaaatttgggtgctatttatagatcctgcccactttttaatgacgataagactacagcacccaagcttttctcaatagacaacttactgcagacccactaaggtggcaggcactga

SEQ ID NO: 483712 - DNA, 122 bp, Homo sapiens
tcctcttctcttttggctcctctgaaccgtgggccagacctagcaccagatgcagagttacagctgaacatgaactgtttaactaggttaacaattacacatggccaaatctctggtaatgc

SEQ ID NO: 483713 - DNA, 122 bp, Homo sapiens
aaggactcatcaatttatcctggtaccaatccatcttgtgtaattttctgtcacaatctacagttgccatatatgaaaacagacaccctggctgatcttggggatgaaaccatgaaatatag

SEQ ID NO: 483714 - DNA, 122 bp, Homo sapiens
ttttccccattcagtatgaaattagctgtgggcttgtcacaaatgacatttatcacattacagtatgttccttctatacccagttggttgaaagtttttaccaggatgagatgttcattttt

SEQ ID NO: 483715 - DNA, 122 bp, Homo sapiens
ggcagcctccgagtggatgggaaagcagaggttttcctcttcaggcaccattctgacttacagtaaatagtgattttgataaatctcctttgctgatattcagcaggacttctatttgatcc

SEQ ID NO: 483716 - DNA, 122 bp, Homo sapiens
tattagtaggctaattaaacagtattttgcatttacattatataggtccgaacattcctacaagactttgccaaactctgaaggtgtgaatattttagtcatcactccaaatcattttaaca

SEQ ID NO: 483717 - DNA, 122 bp, Homo sapiens
atatgcacttagaaagaggctaaacatcattagtcaacagggaaatgcaagtcaaaactacagtaagataccacttcacacctactagctggctataataaaaatggtggacaataataagc

SEQ ID NO: 483718 - DNA, 122 bp, Homo sapiens
atgatagatttcctgaaatacggtttgtgctcacttagtgctagcagttactcattattacagcaccatgagcacaggaatggggagaacctgactcatttcctggaaggtgccatactcta

SEQ ID NO: 483719 - DNA, 122 bp, Homo sapiens
tttctaacaatcatccatgtggtaccaacgctattggtcctaggaccacacacgaagttacaagactcaaccagaggttgacaagcttttgtgaagggcaggatagtagctattttaggctt

SEQ ID NO: 483720 - DNA, 122 bp, Homo sapiens
gccaaaagaacaaagctggaggcatcatgctacctgacttcaaactatactaagaggttacagtaaccaaaacagcatggttctggtagcaaaacagagacacagactaatggaacagaaca

SEQ ID NO: 483721 - DNA, 122 bp, Homo sapiens
gcatccctcaatcacttccattcctgactggcagaagtagacttaccaataatgacattacagcacagtgaagcagtgagctgcttccagaaggctgcccttaaatagagacaaagtgaaga

SEQ ID NO: 483722 - DNA, 122 bp, Homo sapiens
aggaaacgtcagaccaaggatgcaagtgaccacagctccctgggtgcactcagtcccttacagcagtacctcaattaaaactccaggtctcagtagtctgcacaaaaatgggggtcagaaca

SEQ ID NO: 483723 - DNA, 122 bp, Homo sapiens
ggtcttgaagtcgtgggctcatgtgatcctctggccttggcctccaaagtgctgggattacaggcatgagccactgcacccagccaaatgtaatggtatttagaatcatagaaagaaatcgc

SEQ ID NO: 483724 - DNA, 122 bp, Homo sapiens
tgatatgaaaattaaggttagtattattcctgaccctatttccaaagctatagattactacagtacattctagtcagtggaggtcaaagtaggtaagatgttttacttataattgtattagt

SEQ ID NO: 483725 - DNA, 122 bp, Homo sapiens
ggccagcctggtctcgaacttctgacctcaagtaatcggcctctgaaagtgctgggattacaggcatgagccactatacctggccaagttgttttcttaattatatttttagattgttcatt

SEQ ID NO: 483726 - DNA, 122 bp, Homo sapiens
gaagcacaggactgccttgctgcccatctgtcagtccccaaaacccgcagccttgaaatacaggagcaaagactgccatcaggcaccaaggaagatggcctctgagtcagcacaagccccat

SEQ ID NO: 483727 - DNA, 122 bp, Homo sapiens
attattcaattatcccccactaggtccctcccacacaacacatgggaattatgagagctacagttcaatatgagatttgggtggggacacagtcaaaccatatcaatgggttaagtgaaact

SEQ ID NO: 483728 - DNA, 122 bp, Homo sapiens
agacctgtacatctgtaaaaacacacatacctggtgctgttaccacacctgagaaactcacagtcactctctaaggctgccaggtgcccagaagtgtttgtgttggtgtcttaaatttctgc

SEQ ID NO: 483729 - DNA, 122 bp, Homo sapiens
cacacagctgttcacaccagctccattgctaaactgggctatatgttcaagacagacttacagcacaggcacttagaaacttgtaggccccctgttgtgtctgatagtaacatccgtccatt

SEQ ID NO: 483730 - DNA, 122 bp, Homo sapiens
aacgcccgagtttcttctgggagtatggcattttggtacatgctgtccagaaggtgcttacaggactagccttcattaactcttggggactgagttcctaatgagcttcccgagtggaccac

SEQ ID NO: 483731 - DNA, 122 bp, Homo sapiens
tctcaaacccctggcctcgagcgatccttctgccttggtcacacaaagtgcttaggattacaggcatgacatgcctagtcttacattttttatattagagattttatttatgataattttgg

SEQ ID NO: 483732 - DNA, 122 bp, Homo sapiens
ctctcagcttagacccacaatgcaagacaggttgagtgtgaatctccattctgcctcttacagctatgacatcttagataagtgatgtgacctctgaacctcagactcctcacatgtaagag

SEQ ID NO: 483733 - DNA, 122 bp, Homo sapiens
ttgtcggtctttataattgttccagttttctagtgatagcagcaaagcatctcattcttacagaatctatctattaaaacaatcctacaatggatggaaataaagtgctttacagaagggaa

SEQ ID NO: 483734 - DNA, 122 bp, Homo sapiens
ctacagccagaaagtggcacaggggggatttgaacccaggaaacgaggctccacagcttacagtctgacttcttgtgagcccagagtccaggctgagggaacagcttacaggccgttctgga

SEQ ID NO: 483735 - DNA, 122 bp, Homo sapiens
tatggcaggcacaagcctcaggcacatctttggagggtagagctgtaacttgggatgttacagctgctgctgagggtaaaaattgggccttatggcacccacagtgtggtaaatcagtccct

SEQ ID NO: 483736 - DNA, 122 bp, Homo sapiens
tgaattcgctgatgttgaattagtgttgagccagcagtaaaagattttccacattctttacaatcatagggtttctcaccagtgtgaattgcctggtgtccaattaaccctgagcgaaaagt

SEQ ID NO: 483737 - DNA, 122 bp, Homo sapiens
tctgcagtaagcacagttgcatctgcaattgtgaagctcttccataagtacactgtggtacagtcagggttagaatcaaggcaacataaattgtataaatattgaggtggggctgggcacac

SEQ ID NO: 483738 - DNA, 122 bp, Homo sapiens
cataccaggagacacgcacacggagcgctacacagccagaagcaccgcaccaccgcactgcagcacatatgtgaggaggtgacaacatggagggacactacccacttcatacacctttattt

SEQ ID NO: 483739 - DNA, 122 bp, Homo sapiens
aaacagataagatgccagtgacaatgactatcaagagggcaaggcctagacctatataaacagcagcagctacaatatactctgataaggactctgagtccctatcagggcccagtattttt

SEQ ID NO: 483740 - DNA, 122 bp, Homo sapiens
gatacccttgttgctattgacacctgtaagtctttggagtgtgcatctaattctgccttacagtcagtatggggaaattgtggtcttgaccttcaccagaatccctgctgggcaccgtccaa

SEQ ID NO: 483741 - DNA, 122 bp, Homo sapiens
ctgccagtcatacgtatttgtgaagagaaaatgacggaagcaataatagcatttaccttacagcactgctgttggcatgaaagctactctacctattctgtagagtatttaacaataatcac

SEQ ID NO: 483742 - DNA, 122 bp, Homo sapiens
catgaggactaaggggaaacatcgcaggctgacctggggagggggagtcatctacgggtacagctatgtgctctgtggatagatgcccagtggcacctgggctggagttccctccaattttt

SEQ ID NO: 483743 - DNA, 122 bp, Homo sapiens
atatgcaggtatttgacatccagagtcttatttattcagactaagattaaaccaagattacaatagttccattttaatgctctgttgtaatattgggctgtggtagttctgtacttaatact

SEQ ID NO: 483744 - DNA, 122 bp, Homo sapiens
tggccctgcagcagcatctgggggatgcccacaactcatgaagcctcagagggagtgttacagtcagtgctcttttggctctgccatccatgaatggcttaggtgttgaacagctcggtgtg

SEQ ID NO: 483745 - DNA, 122 bp, Homo sapiens
gggaggccgaggctgtcggatcacctaaggtcaggagttcgagaccagcctgaccaacaacagcaaccaaaaagaaccattgaaccatctcctgccagaaagactgcccagcctgagaatgg

SEQ ID NO: 483746 - DNA, 122 bp, Homo sapiens
tggccccacaaagagaataatccagccccgaatgtcagtggtgctgaggataggaagttacagcacccaatactgtatttcccatgtatccagatgactcatggttggtgactttgtaattt

SEQ ID NO: 483747 - DNA, 122 bp, Homo sapiens
gctcacattggcctcccaaagtgctgggattacaggcgtgagccaccgtgcccagccctacagcttctgattttaaagaaattgaaacacttttgtgggcccctaagaatgtcataagtcct

SEQ ID NO: 483748 - DNA, 122 bp, Homo sapiens
tgggagtcactgccgaagtgataagctgtgggtggtgaatgcagagaaggccacaatgtacagcacctaccctgggagtgttcacttggggttcatgttggaacccattttgcttcctccac

SEQ ID NO: 483749 - DNA, 122 bp, Homo sapiens
gagcccattctaacaagcttagtttaacttaatagcctctaaatgccctatttcaaaatacagtcatattctgaggtactgggtgttagaacttaaagacaatgatttattttattttattt

SEQ ID NO: 483750 - DNA, 122 bp, Homo sapiens
cctgtgctttcaactcattagttcttggaagatagcccgatgtccacatattacatattacagtgctccaacagcattcagaatgaggcagtcagtggaggaatttgtgaaatattttccta

SEQ ID NO: 483751 - DNA, 122 bp, Homo sapiens
gcctcaatctctggggctcaaatgatcctcccaccttggcttccacaagtgctgggattacaggtgtgagccaccatgcagcaccctgtgtggcattctttatagaagtgagaaagttaaaa

SEQ ID NO: 483752 - DNA, 122 bp, Homo sapiens
ggagcctgggaggcctgtgtctcacaaggcagttgggacagatttagggcccaggacagacagtacccctgcagctcatagcccagggctgccagcagggctgagaactgaccaagcaagag

SEQ ID NO: 483753 - DNA, 122 bp, Homo sapiens
ggttggagtacagtgatgcgatgaagctcactaaagcctcaaactcctgggctgggattacaggcatgaaccagcacagctggcctcctggttaatttaaattttttttttttttctgaggt

SEQ ID NO: 483754 - DNA, 122 bp, Homo sapiens
gcatgggccttcacattccagggaaacaaagcagggcatgagatgagacaccccacactacaggccaaacaactctagtactcactttagggagctagctggataaccagctgccagggggc

SEQ ID NO: 483755 - DNA, 122 bp, Homo sapiens
aaggaagaatgaggttcaacttcaggcagatggctccctcacaaaggctctctactgctacaatactacagagacagcactttccctgtaggtctaaggctctacttaagtgtggactttca

SEQ ID NO: 483756 - DNA, 122 bp, Homo sapiens
tatcagaaattacaggcattgtcatagttactacttatgtgaactatggagctctttttacaagactctcctttgagtgttttttgtgagtgctggtcactcccttgtcctctctttcctta

SEQ ID NO: 483757 - DNA, 122 bp, Homo sapiens
ggttcacaaatccaggggctgggctttaaacggcattaggtggacagaggagggttgctacagctgaggtctcagctggtgcagcacaaaagtgaaatagggccatggctatctgaagccat

SEQ ID NO: 483758 - DNA, 122 bp, Homo sapiens
tttccatgtggctatccagatgtcctgtaggaagtgtttgtaaaccacttaatcattatacagcccccaaggggtgatgctttgttgacatggaaactgggaagcaaagatgcttcttgggg

SEQ ID NO: 483759 - DNA, 122 bp, Homo sapiens
gggcccagccatatgacacaatgtcccctgtggaagagccaaggctggagagaagattcacaccacctgggtacaagatgtagtgatgtcaaaatgtcccctgtgggtagtgccaaggcagt

SEQ ID NO: 483760 - DNA, 122 bp, Homo sapiens
tggactaggcaccaagcagaaaagtcaaatcactcaggtgctgggcagaggtgtatgttacagtcacagttgaaggaaaaggtagggataaaattaacaatcctgctgggtgtggtggctca

SEQ ID NO: 483761 - DNA, 122 bp, Homo sapiens
actatggggtgggaggatgtaagggaatttttttccctttggaatagtctgttacagttacaggccactcttaagcagccactgggtcaaaggagaaattgctcagaacagggatgtcagga

SEQ ID NO: 483762 - DNA, 122 bp, Homo sapiens
aaaatcaacccattttccagaagggaaactgaggctcagaaacggaaggggacctggttacagcctctgacaagtcagacacacacaggctgctgttccaggtaccaattataaccacagtt

SEQ ID NO: 483763 - DNA, 122 bp, Homo sapiens
cgatattacacaatgtcccctgtggaagaaccaaggcagaagattcacaccacctgggtacaagacccagtgatatgtcactatgtcctctgtgggcagtgtcaaggcagtaagatagtcac

SEQ ID NO: 483764 - DNA, 122 bp, Homo sapiens
gtgtgaggcccaacgatattacacaatgtcccctgtggaagaaccaaggcagaagattcacaccacctgggtacaagacccagtgatatgtcactatgtcctctgtgggcagtgtcaaggca

SEQ ID NO: 483765 - DNA, 122 bp, Homo sapiens
caccccaacctcctgcccacacccagcccatacagctggcaaattcactgaataaaactacaggatgcccagttaaattggcatttcagataaatcatgactatgtcccatgcactctttgg

SEQ ID NO: 483766 - DNA, 122 bp, Homo sapiens
gggctcaagtgatcctcccgcctcagcctcccaaagtgctgagactacaggcgtgagccacagtgcctggcctgaggtgcactgattgtaaccaatgcaccattctgggaggtgatgttggg

SEQ ID NO: 483767 - DNA, 122 bp, Homo sapiens
ggaagaaaacaggagtcagataacgtaggagctgggcccagctatatggcacaatcactacagtaggcaaggccttggcatgagaggagagtcacatcagatatgtgctgggcccagcgata

SEQ ID NO: 483768 - DNA, 122 bp, Homo sapiens
cagccagtctatcttataactgttgaaagttacttagtgtagtgtgaagatgggaataaacagctcctgaatgctaacaatggctgttcattatagggtgacccaaggtggccatgccatgg

SEQ ID NO: 483769 - DNA, 122 bp, Homo sapiens
caagagcagggattttcctttttctttatttacagtgaacaattccatcacagctacctacagcaggagctggcaaatgtttctacaaagggctagacagtaaatcttggccttgcacaaca

SEQ ID NO: 483770 - DNA, 122 bp, Homo sapiens
tttgaattctttgatttttaaaagttaccttactatagtatacattgttctaaaggtttacaatccaaaacctaccaggatcatagagattggaaacccagccatatcaccagatctgtgaa

SEQ ID NO: 483771 - DNA, 122 bp, Homo sapiens
gaggcaaaattccttatctgaggaatgtagaagtaattaattagacttccctattatctacagcaggcatctggttccaggattcttttcaaaaaatgtctaagtacctagaatttccacac

SEQ ID NO: 483772 - DNA, 122 bp, Homo sapiens
ggagcacctatcctgtagggttgtccaagggatcatgtaggataatgcacgcagtgcatacagcacatggctgaatacagtgtaaacagaagctgaaatcatcattctagcactgaagcttt

SEQ ID NO: 483773 - DNA, 122 bp, Homo sapiens
atttcatgggtaattgaatgattttgcataaaactgtagatttcttgcaagactggcctacagtcctgaatggcagcattgaaacagactgatcccatttaggcagtgtgtgcactcaccag

SEQ ID NO: 483774 - DNA, 122 bp, Homo sapiens
caagtgggttctgagcatctcctgccattgtgtgcccagatgggggaacaaggggaaagacagcacctgtcacatcacaggcccaaggctgccagagagtgaccaaacccagagaggtaaca

SEQ ID NO: 483775 - DNA, 122 bp, Homo sapiens
taggctggtctcaaactcctgacctcaagtctgcctcggtctcccaaaatgctgggattacaggcatgagccactgtgcccagccatgttttttttgagactgagtctcactctgctgccca

SEQ ID NO: 483776 - DNA, 122 bp, Homo sapiens
acctccacctcctgggttcaagcgattctcctgtctcagcctcctgagtagctgcgactacaggcacatgccaccacaccaggctaattttttgtattttagtagagacagggtttcaccat

SEQ ID NO: 483777 - DNA, 122 bp, Homo sapiens
ggtgcactgtcttagacatgcgcacggctgctgtctccccccaggtgagaagcttgactacaagacctgtgaggccctggaagaggtcttcaagaggctgcagttcaaggtcgtggacctgg

SEQ ID NO: 483778 - DNA, 122 bp, Homo sapiens
aacactggtcgaaaatttctttactctgaagttcctaagctggaagggcacagaaggctacagcactacccagagggaaggttgtgcctaagaatgaagccaacacaagggaagcagatctg

SEQ ID NO: 483779 - DNA, 122 bp, Homo sapiens
agagcctcctatatatgaggcagtgagcctgaatgatgtcctccgtaggaggaatttctacagcagtgactgctgcttagagaagatgatcattagtttatgtgatgaacactgtcacagtg

SEQ ID NO: 483780 - DNA, 122 bp, Homo sapiens
catgagtgccctgggtggacactggtgaaaggtcactgccttcaggacacaccataggtacagtcaccaaggtaacccagttcaaagtagagcaggatgttgggtatttacaaaggagatct

SEQ ID NO: 483781 - DNA, 122 bp, Homo sapiens
gattggggagattgtggcaaactagaggggaagtgcccattgtaaaaacacatccacagacagtccaggcactaaggctgaatgggatcagggtatccagaaatctcaggatctccagggcc

SEQ ID NO: 483782 - DNA, 122 bp, Homo sapiens
gggcacctaggacgcatctcacgggctcttgggcagccctggggaataggcacggttttacaggtgaggaaactaaggctcagaaagacccagctctgtgtttaccctctcagccacaccac

SEQ ID NO: 483783 - DNA, 122 bp, Homo sapiens
tgtacggctgtgtaatagtgtcagtgggtttcctgtcagttcctctgctgttctgtgttacagctcattagagtatgtatgtgtccacacatggacagaaacatacaggcttttgctgtgtt

SEQ ID NO: 483784 - DNA, 122 bp, Homo sapiens
gactgcttcctaagtcccccaggtctcatttatgccataaacactctgaaaattcctttacagtcccctctgaagcagggtccccatgtccatgatctgtaaccatgctttgtaaatcacgt

SEQ ID NO: 483785 - DNA, 122 bp, Homo sapiens
cctgctgtttccattccttccttcttcagtgcaaaggtaaaaggagtagcagtgtatttacagccaagcatttaggggaaaggaacagcctgcactcaggccaccttcagctcattcctggg

SEQ ID NO: 483786 - DNA, 122 bp, Homo sapiens
attataggcatggaccaccatgcccggaccaaatcaggtacttttgcttctgtattgttacagcatctccatggggtaggcaactttgtgccttccacagtacagatggggaaactgaggct

SEQ ID NO: 483787 - DNA, 122 bp, Homo sapiens
gtctcgaactcctggcctcaaatgatcctcccaccttggcctcccaaagtgctgggattacaggcatgagcctccatgcctagccttcttggggaaactgaaacagatttctttaactgccc

SEQ ID NO: 483788 - DNA, 122 bp, Homo sapiens
gtctcaaactcctgagtgcaagtgagcctcccgcctcgacctcccaaattgctgggattacaggcatgagctcctgaaatattgttgaaataaatattttggatatcacttctctttttttt

SEQ ID NO: 483789 - DNA, 122 bp, Homo sapiens
gggtcttagtatatagaagtctaggtggcatagtggctagggctgcagatgcctgacccacactacctgtgttcaaattcctggttcttccattgaagtgctgtgtgacctttggcaagtca

SEQ ID NO: 483790 - DNA, 122 bp, Homo sapiens
gtcttcaactcctgggctaaagcaatcctcctgccttggcctcctaaagcactgggattacaggcatgagccactgtacctggccaaattaatcattttaaagtatataattgcatggcatt

SEQ ID NO: 483791 - DNA, 122 bp, Homo sapiens
ggcccacctcagactcacctgtgatgacacccagccactgcaggagaatgtgcttagccacagtcacacagcagcaagaggccagggaagctgctaaatgctgtgcttccatcccagaggtg

SEQ ID NO: 483792 - DNA, 122 bp, Homo sapiens
aattatgagtaaacacaattttagtatcttttatttcactaaattggaatgctgctattacaggacaaataaagacaggtgatgtggccacccaaacaccaccaacatagctctttagttag

SEQ ID NO: 483793 - DNA, 122 bp, Homo sapiens
atatctgcctttcaggttcaacaaattctcctgcctcagccttcagagtagctgggattacaggcatgtgccaccatgccaagctaatttcatgtttttagtagagacagagtttctttatg

SEQ ID NO: 483794 - DNA, 122 bp, Homo sapiens
tactctatttttttcttggccctgctcacataagacattgtgacatgttgctgggttttacacccaagtgatgtgagtttcctgcctggaccatgcttacagaaaacattttaacacatatc

SEQ ID NO: 483795 - DNA, 122 bp, Homo sapiens
gattacaggcatgcaccaccatgcacaatctggtcatatttttgatgtgttgattctttccagtccagatgtataatctcatccctgaacatttctgatggtgtgattatgacatgtgactt

SEQ ID NO: 483796 - DNA, 122 bp, Homo sapiens
gggcccagcgatatgacacaatgccccctgtggaagagccaaggcaggagagaagattcacaccacctgggtacaagacccagcaatatgtcacaatgtcttctgtgggcagtgccaaggca

SEQ ID NO: 483797 - DNA, 122 bp, Homo sapiens
agaggaaccaggcagcacaggagagtcacacgacctaggttctgacccagcaatatattacaatcccttcttaggaaaagcctaggaagtagaggaaagtcatatcacctgggcactaggcc

SEQ ID NO: 483798 - DNA, 122 bp, Homo sapiens
gaatatgtatttgaacttcaatggcaaatctttgacagaacagatggaaaaatcgttttccagcacagggtccctgccttctggctgcacctggtgtcctccagctgcacagggccaggcca

SEQ ID NO: 483799 - DNA, 122 bp, Homo sapiens
gcaaaggccagatggtctcaagcagatgtgaagaaatggttattgagtctcctgtgtctacagtcacaactctattcagtctacccaatgctgcaaagtgttgggtgagggaggcagacaga

SEQ ID NO: 483800 - DNA, 122 bp, Homo sapiens
accgtggcctgagcccaggaatgttctatctgggacatgcaattacagggggttgggttacagtcccaccactggcaagggcttggtggcaggagataagaaggtggcaccaggaagggttg

SEQ ID NO: 483801 - DNA, 122 bp, Homo sapiens
taaagtatgatatattacttttgtttaaacaaaacaaagcaaaacttcaaacacctcttacaggtctctgcttctatacagagaaaagcatggaaggatacactccaggctcttaattttgg

SEQ ID NO: 483802 - DNA, 122 bp, Homo sapiens
gagtagtgggcacaggcaagaaaggcctccctggaagaatgcaagggatccacacagatgcacccaatgtctctggaaatgactgggcaagactttgagtgaaactggagacctggcattaa

SEQ ID NO: 483803 - DNA, 122 bp, Homo sapiens
ggtgggttcctggtctcgctggctcaggagtgaagctgcagaccttcgcagtgagtgttacagctcataaaagcagtgtgcatccaaagagtgagcagcaagatttattgcaaagagcgaaa

SEQ ID NO: 483804 - DNA, 122 bp, Homo sapiens
aacagaagctgaagactagagtggaaaaaaatgatagtatcttaggatggaaagggcctacatcacctcactttgttgcctctgcctgcaggaattgctgggcagcatttgaggcagatgac

SEQ ID NO: 483805 - DNA, 122 bp, Homo sapiens
gccgggtaggaggctgggcccggagcccagggatcttgaatggagactggggtcaccccacagtacctgccactgttgccacagtctcaaagccacaggaacagcccctgcatggtaggacg

SEQ ID NO: 483806 - DNA, 122 bp, Homo sapiens
tatgtgctttataaaatatgtgtttaggtttgcttagaaaatatatatcttaattatttacagttcagtcacccattttgggattgttcaggcttttagctgatgacccatttttctccctc

SEQ ID NO: 483807 - DNA, 122 bp, Homo sapiens
accagggtctctactcccctgcacagctttgggacactgtttcctgcatcccagctgctacagctccagctgtggccaagagggcccaaggtacagctctggatgctgttccagtgggtgca

SEQ ID NO: 483808 - DNA, 122 bp, Homo sapiens
aatcagccccacaggtggataggagaagggaaagagaagaagaatgcatatttgagaatacagccagtgaaggcaagaacacagttcctgcccaatattgtggcctttgtgcatggctctgt

SEQ ID NO: 483809 - DNA, 122 bp, Homo sapiens
aggatgggtaagagggactataacacctctacctctcagccccaggcacaaagacagctacagcttctgagctgagccctgtgtgtagcatgtaaaggggatgaccagtgccttatggtttg

SEQ ID NO: 483810 - DNA, 122 bp, Homo sapiens
tgagatttcaagggtgatcagatattgaacatagaaggttcttgctaaaaaaggagtttacaagaaagtgtacaaatgtgcctgggagaaggttcaggagcctgactaaaatttggtcaagc

SEQ ID NO: 483811 - DNA, 122 bp, Homo sapiens
aatcaggaaggacaaaggttgatcacagaagacggccttagacctctatcagcctggagacagcaccagaggaatctgcataaaaagctttgctaactagcctttatctaccattattttgt

SEQ ID NO: 483812 - DNA, 122 bp, Homo sapiens
aagtcccaagatctgccatctgcaagctggagaaccgggaaagccagcaatatagttctacagtccaagtccaaaggcctgacaactgggaattccaatgctgtaagtaccagttcaaagga

SEQ ID NO: 483813 - DNA, 122 bp, Homo sapiens
acagataaaatcaactcactgagacttcagcattgcagtaggtggagttattactcaaatcagtctcctcaaaggctcagagttagggtttttcaaggatagtttggtgttgggggctaggg

SEQ ID NO: 483814 - DNA, 122 bp, Homo sapiens
aaatgaacaaaagtccctgtttctgtctcataggagtgagtggtgcttctttttcaattacagctttagcctcagtttgttcttctagataagaaatattaagattccagctgagccgggca

SEQ ID NO: 483815 - DNA, 122 bp, Homo sapiens
ggatgaagtgattgacagttgttacttataattattcttgtgaaggaatattatttttcacagcttttgctaatctcaattaggacactgggttttaacccagctttcccattaatttccta

SEQ ID NO: 483816 - DNA, 122 bp, Homo sapiens
aatgtgacatgctttgtgtgtgttgtaaggtttgagaactacatgaggttttcatgtttacaagcctgggtgttttgaacaatataatggttctgcagtatatagatgcatctctgaatgat

SEQ ID NO: 483817 - DNA, 122 bp, Homo sapiens
cagatccagctgtggctaaatggggccaagatacagcttgagtcattgcctcaaagggtacaagcctcatgcctttgtggcttccatgtggtgttggacctgcaggtgggcagaagatgagt

SEQ ID NO: 483818 - DNA, 122 bp, Homo sapiens
tgatgatagagagataccagtgggctagggagatcccaaaatgtgatgagacctcaattacagctggctggtgtcaaggctcttgacactgtagcaggaagcaattcaaggattagtgggaa

SEQ ID NO: 483819 - DNA, 122 bp, Homo sapiens
ttgatcaggccttcagaaaacaagaataaagagtgcggagggcccagcaaattcagattacagccatgctgccctttctagggaaggtgaggggtaaggacagaaccacacactggttgatg

SEQ ID NO: 483820 - DNA, 122 bp, Homo sapiens
taagtgtgccaaggatttgagtaagcgaaatgatcatgtaacctccaaaccaaggctttacagcacttcaaaaagagaaaatcaggacaatgaattctggctgaactttaaagtccccaaat

SEQ ID NO: 483821 - DNA, 122 bp, Homo sapiens
gggtctggggtcagagcattaacactggagactagctcattaacactggagactagcctacagtcccagcaggtagaaattgggcataacagcagtgattccaaaaagaggacccagaagct

SEQ ID NO: 483822 - DNA, 122 bp, Homo sapiens
tgcagtcagagtgaagtccagcttgctccagtgtcacacatcagccagaggacagtcctacaggacatcacctgtccctgttgtctaaggagcttgggataggagcagaacgcacctgagcc

SEQ ID NO: 483823 - DNA, 122 bp, Homo sapiens
cacctgcttgtggtggaaagggaatttgggggtggggagcagtgacccaggatgttttcacagctgcagagggatcatcactgctctggcactggggaaagtcacttcatctctgagtcttc

SEQ ID NO: 483824 - DNA, 122 bp, Homo sapiens
caggctggcctcaaactcctgacttcgtgatctgcccgccttggcctcccaaagggattacaggcttgagccactgtgcccagccttaagtttcttatagattctagatgttagacttttgt

SEQ ID NO: 483825 - DNA, 122 bp, Homo sapiens
gcaaaactaattagtgaggggaagtattgaaaaatcactcagatggcagtgtggcaattacaaaccattgaaagtgtgaggcagatggtgaagttcttatgttgtcttacttatcggttcaa

SEQ ID NO: 483826 - DNA, 122 bp, Homo sapiens
gcaaagcatgtttaaatatactccatgtcatattcagggaaagatagtgcttgaaaattacaagaatgctatcttggcccaatccaaggagttgccagtgaattagagctggtgttcaagtg

SEQ ID NO: 483827 - DNA, 122 bp, Homo sapiens
taggaggtcatctgcagggacgcctgcactgatggggagtccttgagagccagctgactacagctctgggatgatgagggtgggaaaattgtccagttagaagaaatactgaaaacctcaat

SEQ ID NO: 483828 - DNA, 122 bp, Homo sapiens
tgtgaccacagataaataaggaagatggacaactgagagctgagcatggcagcagctctacacccatcttgtttcaccctgagcagctccctgttggtatttgtttgactatgtacgtgtct

SEQ ID NO: 483829 - DNA, 122 bp, Homo sapiens
gagcaggacacaggaatcaccagtagcaagacagttcccttggttgatagtcttggactacagtcctagagtagccccaagactcagctactcctgaatgtcttctgggaaccagcagtcag

SEQ ID NO: 483830 - DNA, 122 bp, Homo sapiens
ggcaaaaacaaggcacccaggagctgagcagcacacggtgtggggctcgtcagccacttacagccttctggttcccaggtgcttgttgtggctgcacactggaatcacatgagaatgttgag

SEQ ID NO: 483831 - DNA, 122 bp, Homo sapiens
agatgggtggtgattgcctgagtgctgtgttgcaaaacaatcagaggttgtatctgacaacagcagtaaaagctacctgatcaattagtgatgtctgccatgagtgcttggaatgaggaatg

SEQ ID NO: 483832 - DNA, 122 bp, Homo sapiens
tctaggagtcagtgtaataaattatcaaaactgagagggttatggaaacccttagatttacagtcagtcagtcagaagtgtgtatggtcctaagacttgcagctgacatctgactgaggtct

SEQ ID NO: 483833 - DNA, 122 bp, Homo sapiens
ttgtgtaagtacagtagaggcataccaataagctcctaacagaggaaaaacattcacttacaggctcagcaacttctaaaagatttctttcaactttgaagtgaccaagtctatcaccttta

SEQ ID NO: 483834 - DNA, 122 bp, Homo sapiens
gaggctggaggatcgcttgagcccaggagttcaaggctgctgtgagccctgattgcaccacagcactccacctgagtgacagagtgagaccctgtctcagaataagaaataaaaaaggaacc

SEQ ID NO: 483835 - DNA, 122 bp, Homo sapiens
ctgtaaaattaaatgagataatgtcgaataggcccggtatacatggtgacatgtgcaatacactctagtaccatgagatagttggaatagtctgtagttagaatgcactggtgctggcttgt

SEQ ID NO: 483836 - DNA, 122 bp, Homo sapiens
cacatgactgctgtgtatggaggcaagggtggggcaggtagaatccttgggtggctactacaataatccaggtgagaggtggtggtagctcatgccagggccttagcagtggagggatgtgg

SEQ ID NO: 483837 - DNA, 122 bp, Homo sapiens
tatagtaagatgctgaggcaagaagataatatctgttctttaaaattgtcgtaaggattacaggagataaatgtggaagggctctgctacactatggtggatttacagattttaaagatgat

SEQ ID NO: 483838 - DNA, 122 bp, Homo sapiens
ttgaatatggtcttctaatttggtcatcagattttgagttagaaacacaactcgtatttacagcctttatgtactatatttgctttaaaaaataccctgtgttggtgaatgttgcgtaaatt

SEQ ID NO: 483839 - DNA, 122 bp, Homo sapiens
tcaaagaggaaaggcatcacatctgtaggaaaagaagaattcaaaggactttcaactttacagctgctgttccctagacctagaatgctctctcatagcaggtggtcttcttctaacccaag

SEQ ID NO: 483840 - DNA, 122 bp, Homo sapiens
ccacccttgttttgagatttcaaatgaggagtgggggatgatggaatgatttgtccgctacagtcaagtagtttcagctaagtgctaatttcatgaacttacaaactgacatgcctccaggg

SEQ ID NO: 483841 - DNA, 122 bp, Homo sapiens
gtgcaaagccatgggtctcctaagaatctatgtctatttttatggtgtgactttttattacaggcacctaccatggaggttgtccaaatacagctttagacctaagtgctacagaatgtagc

SEQ ID NO: 483842 - DNA, 122 bp, Homo sapiens
aagaaggaagcagcacttaaatgggttacatgaagggatactcagccactaactcttctacagcaatgaacttccagacatgaagcatcagtctagggtgttggcagaaaggctaaatggtg

SEQ ID NO: 483843 - DNA, 122 bp, Homo sapiens
taaaacatcatagataaaggagtcacaggattagacctaccgttccataccagtgtgttacagcctgtcatgaagcagactcagagaatttggctactacttagtactaacatttaatttag

SEQ ID NO: 483844 - DNA, 122 bp, Homo sapiens
caaaggccctatctccaaatacagtcacattgtgggttagggtggacaaaattcagtccacagcacccaatagcaagctttgctaattgtgtcaaagatacaggtaattgagagattcatgc

SEQ ID NO: 483845 - DNA, 122 bp, Homo sapiens
acattacagaactgttttcttacaattgttttcttttttcttgagatggacgtattaatacagtacttcataaccatttaacatgggtaaaacttattaggcttcctttgtgctaaagtttt

SEQ ID NO: 483846 - DNA, 122 bp, Homo sapiens
aggtgatccgcccacctcagcctcccaaagtgctggggttacaggcataaactgggattacaggcatgagccactgtgccaggccctgaattatcttttaaattaaaattaaagtcagtaca

SEQ ID NO: 483847 - DNA, 122 bp, Homo sapiens
gaaggcagctgcacttgtgaaaatgttcatctatcgacactgcactcacctgaaatactacaggctgtggcatgagcccaaatctgctcatgaatgtttatccctctgagggcagccacacc

SEQ ID NO: 483848 - DNA, 122 bp, Homo sapiens
gggacatatgggagcctccgtgcttgtttggtggagtcaatgggatctaaaacagaggtacagtccattgctgggtgggtcatttagcaccttccatggtcaaagacctaattcatgacctt

SEQ ID NO: 483849 - DNA, 122 bp, Homo sapiens
ttagaccaaggtgaggcagtggagatggagacaagtggattggttgaagatacatacattcagtagataatgtatctaccaaccaggcttggtgattgattagacaaggaaggtgaagaggc

SEQ ID NO: 483850 - DNA, 122 bp, Homo sapiens
acaaggaagacagaacagcactgctgttctacactgtggctcttgcccagtctatagttacaagaaatagttctttagttgttgtgatgccctgggtaggcttcattcttaagtaatgtact

SEQ ID NO: 483851 - DNA, 122 bp, Homo sapiens
ggagtctatagcattggaagtggtggactaggagagttctggccccagcataattcactactggtggggatccagggctactagctgcagtagttgcctttgagaagcctctaaagactgaa

SEQ ID NO: 483852 - DNA, 122 bp, Homo sapiens
aggagaaaaagaagagcaagttacgagggaatgagactataaagtgtagggtgtgtattacagtatgacatactcagtgtaggtcaccccattcagcaggtgacatctgaaagaagtaaaga

SEQ ID NO: 483853 - DNA, 122 bp, Homo sapiens
accaagcgaacagatgtgagttattgattagagctgacgggaaggggttaggctgtttcacagtaactaggtgcaaggaggaacaggaaagttgagtttaagaataaaagacaaggaagtta

SEQ ID NO: 483854 - DNA, 122 bp, Homo sapiens
gggaagatttcccttcaacgctttccttcagggatgtcctagaaaggggctgtagtgctgcagctgtccacttttggatggtggctgcatattgtgcagaaccagccatctgtgaaccaggc

SEQ ID NO: 483855 - DNA, 122 bp, Homo sapiens
agtatatcaattacgtagttacaggaaaaggcagctgccattctaccatctagcatcttacagtactactcatattgtagaagttgctaaacattaaagggaaatacttttgaatacaagta

SEQ ID NO: 483856 - DNA, 122 bp, Homo sapiens
aaaaatctccttggagaaagaaaacgtgagacttggtaaagacaaggcttggtgcttttacagtcatgtgtctcataatgatgtttcagtgaacaacagaccacatatatgacagtggtctg

SEQ ID NO: 483857 - DNA, 122 bp, Homo sapiens
ggttttgcttgccagggtcagcaggtctagggcaggaacagagtggcatgacccactttacaggagttggcaacatgagttacataggtgaaaaagagaaacattttgaggaatcccacagt

SEQ ID NO: 483858 - DNA, 122 bp, Homo sapiens
tggcaaagaggaaggtcacagaaaggggtgagaattgggtctaggaatagaatcaatctacagcagatagctaagagggaaaatgcaggagggaatctatgaccaagctccttgggcatggc

SEQ ID NO: 483859 - DNA, 122 bp, Homo sapiens
gtctcgaactcttgacttcaagcgatcctcctacctcagcctcccaaagcgctgggattacaggcatgagcagctgcacccagctggacatctttttagcaacaggcattgacattgagtca

SEQ ID NO: 483860 - DNA, 122 bp, Homo sapiens
aaggcaggggaaatactggtttcatgtgtgagagttagataagaaggtggctgagaggtacagactctggatttgtagatttgtgtcttagtccatttgtgctgctataacagaacatccca

SEQ ID NO: 483861 - DNA, 122 bp, Homo sapiens
agaatggctctttggaggcctggatgacaatctttccagtttcccatgagataacagatacagccaagaagtatgggaaagaaattgtgggcagtatagaaatctagcaaaaacacaggaac

SEQ ID NO: 483862 - DNA, 122 bp, Homo sapiens
tcatatgaattgagagctctactgaaaaggctaagagccttgcattgactcagcacaatacagtactgtaattgggtactgtgatttctgacttgggcacaaaagggtgcataagacatatg

SEQ ID NO: 483863 - DNA, 122 bp, Homo sapiens
tggtctggtactcctgaactcgtgatccacccacctcggcctcccaaagtgctgggattacaggcatgagccacagcacctggcctcaatgatttttaaatattaatgcaaatttaatcccc

SEQ ID NO: 483864 - DNA, 122 bp, Homo sapiens
ttgaaaaaagaagactagcagttgcttccaagatggccaaataggaacagctctggtctacagctcccagtgagattgatgcaaaagacaggtgatttctgcatttccaactgtggtatctt

SEQ ID NO: 483865 - DNA, 122 bp, Homo sapiens
gccttggggctctggggaatctgagacaactagggactgaagtggtcccctgtcacagtacagcagctctgtggagagatggccagactctagtcctagatcttggttctcttcactaggtg

SEQ ID NO: 483866 - DNA, 122 bp, Homo sapiens
gctctacatcatttagtcttcaggatattcccatcttaaagatgtgaggaaacttggccacagtcatcagtctaataagggaaattttctattatactagtagggaacactcaggatcttct

SEQ ID NO: 483867 - DNA, 122 bp, Homo sapiens
ttggtcatcagaaatgcaaaatcctgaaaagacatctcaaaaggccaatcttaagtgctacaatagtgatattatctgcaggagtaattagggaagttgcaaatcttacagcttctggaata

SEQ ID NO: 483868 - DNA, 122 bp, Homo sapiens
tcagcagaaatggggaagctggagaacttaacacagacatgcctgatacactctggggtacagcacaccccaatccagcctggggctggtggagcagtgctgggatcaaagctcagcaagca

SEQ ID NO: 483869 - DNA, 122 bp, Homo sapiens
gacaagaccacctgttccatgggggggcagtgtgccttgagggcttaaacaccaaggttacagctgctccactgggcctaggctctgagtagccaggtttgggcacctcagccactgggatg

SEQ ID NO: 483870 - DNA, 122 bp, Homo sapiens
ctctggcctatcctatttccctcacttactcggaggcttccctcgagaataccctcactacagcacttgcacaagaatcctagggtcaggctctgtttccaggaaacctgatctaagagtat

SEQ ID NO: 483871 - DNA, 122 bp, Homo sapiens
aatagttataagggatttctgaaggaagaattggatatgttcccactgatctcagaattacacctttgacccagcataagttgtgttttattttctaagacaatgcattggtcagctctgga

SEQ ID NO: 483872 - DNA, 122 bp, Homo sapiens
ctagatttaaacatggtgccaggtagaggcaggttctggccaagtacactccctgcgctacaatcacatcaaacagcatgtgttatcaatggactgtgagctctggtacaggggacttgttg

SEQ ID NO: 483873 - DNA, 122 bp, Homo sapiens
tggtgccaggtagaggcaggttctggccaagtacactccctgcgctacaatcacatcaaacagcatgtgttatcaatggactgtgagctctggtacaggggacttgttgtagtgggcattat

SEQ ID NO: 483874 - DNA, 122 bp, Homo sapiens
caactgggctccagtgatcctcctgccttgccctcccaaagtgctgggattacaggtgtacaccaccatgcctggctccttgaatgtgtcttaaaagttaaagaactatcaggtgaggaaaa

SEQ ID NO: 483875 - DNA, 122 bp, Homo sapiens
tgatgcagtctgatggaggatgccggggaggaagaagaggagggatcaaaaataaatttacagttacttaagtgattactatgtaacaagccctgagctgagttgtaattgttgttgttttt

SEQ ID NO: 483876 - DNA, 122 bp, Homo sapiens
ccagctgttcagctaggatcctgggtccccagagctgacagcctcataggaacagacttacagtaactcagtgtgagctggatgcatactaggtgccagtgcattcctttagtgggtgctgc

SEQ ID NO: 483877 - DNA, 122 bp, Homo sapiens
acaaataattacatggcccaaaatgtcagtagttcaagactcagaagccctgattttttacagtaatccagatctactgtctggagccttccctgaagtcacatgggggaagggtggatagc

SEQ ID NO: 483878 - DNA, 122 bp, Homo sapiens
gcccaggatccctctgctgtgtgcagcctggagacttggtgccgtgcattccagctgctacagccatgactaaaaggggccaaagtacagctctggctgttgcttcagagggtggaaaccct

SEQ ID NO: 483879 - DNA, 122 bp, Homo sapiens
cctaagacctacagggtgagttgacaagctggagacccagaagagccaatggtgtagttacaggctgaaggctggcatgttcaagacccaggaagaggcaatgtttcagtttaaatctgaag

SEQ ID NO: 483880 - DNA, 122 bp, Homo sapiens
aaaaaaaaaaaaaaagatttatagcaaatctgtgattattattttgctaatcactggctacagtgaggatagcttagtaccattatgtgaagaccaccaagcttggtggtgctcttaagtgg

SEQ ID NO: 483881 - DNA, 122 bp, Homo sapiens
ctcagctgcaactttgctccaccctggagtgggcaccaggagtggggagaggccagacaacaggagcaggcactttcaagcctgcagggaccaggggcttcctgggcccccaggagtgcagg

SEQ ID NO: 483882 - DNA, 122 bp, Homo sapiens
gcccagggtcctgatgccctgcacagtctgaggacaatgctcactgcatcccagctgctacagctccaattccagctgtggctcacaagggcccagatatagcttgggccactgctccacaa

SEQ ID NO: 483883 - DNA, 122 bp, Homo sapiens
tgatggtactgaggcacaaataatccaatggaaatgaaaagaccctgaaacaacagagaacaggaggtgccacataactgctgaaaagcaggtggatgcaattatcataatgagcagcagag

SEQ ID NO: 483884 - DNA, 122 bp, Homo sapiens
ggaacatgtgggctatttcagcattgattgaaacataaatgaacattgcagacaatgttacaggatccagataatcagctcagccactggcatggcatttgagtagacaaaggagtggacaa

SEQ ID NO: 483885 - DNA, 122 bp, Homo sapiens
cccctggcatccaagggacaaggggggacaaaaggaaaagaaaggaaaaatacagcaatacagcaatagggtggtagaatgtctgactcatgaggcttaatcttgcttctctgggctgcagc

SEQ ID NO: 483886 - DNA, 122 bp, Homo sapiens
tgtagcctgtagtatgctttctcctgttttcttttagcccttattatgtgtagcaagttacagctccagttgactgatgaggcaaaattgggttcatgttctaggccatctgactttgtttt

SEQ ID NO: 483887 - DNA, 122 bp, Homo sapiens
tccatatggtaatgtctcccatattaatcactaggttaatggctgctcctggctagatcacaggaccctgcatgatactggaatgctccctggtgaggtactgcagaggtatgtgcagaaac

SEQ ID NO: 483888 - DNA, 122 bp, Homo sapiens
ccaggggcagtcccactcctaccttgtgccctagaatggacagggatcaaacagtaattacagcacaggctatcccaagtctagaagatcaatctccaggcacagagggcactcatccaaga

SEQ ID NO: 483889 - DNA, 122 bp, Homo sapiens
actggcctgctcatcgactgtcttctctgaattggaataagaccaccatttctgaggttacaagacttacagcaggggtcagaaatctttttctgtaaaggcccagacagcaaacgttttag

SEQ ID NO: 483890 - DNA, 122 bp, Homo sapiens
gagtactaaacttgggagtattttagacaccattgttaaaatgcagatttcaaggtcttacacccagagattctgatttggtagttctggtgtttggggcctggatgctgcgttttaaatta

SEQ ID NO: 483891 - DNA, 122 bp, Homo sapiens
aaagaatttaagggcaagccaagggtggaagaaaacagctttattgaagaggcagtgttacagctctgtgactgctcctgcaaagcaggagcattaggcagagaatagcagctcagggcatt

SEQ ID NO: 483892 - DNA, 122 bp, Homo sapiens
gcatcccagctggtccagccgtggctagcaggggccaaggtacagctggggccatggcttcaggaggtgcaagccccaagcctttgcagcatccacatggtgttaagcctgcaggtgcacag

SEQ ID NO: 483893 - DNA, 122 bp, Homo sapiens
ctactatttaattgaaggtggcagagttttgaaagtattcacattcagtcttctagattacagcactgagcctgaagtatctgtaatttctctttgggtgacagaacatgctgtcgtaactg

SEQ ID NO: 483894 - DNA, 122 bp, Homo sapiens
ggtgaaaccccatctccattaaaaatacaaaaattagctgggcatggtggcgtgtgcctacagtcccagtacttgggaggctgaaacaggagaattgcttgaaccccagaggcagaggttgc

SEQ ID NO: 483895 - DNA, 122 bp, Homo sapiens
gggctcaagcaatccacccaactcagcctcccaaagtgctgggattacaggaatgggttacagcacctggccaaagtttcatctatatttacagtggctccccattgcttgcattactgcct

SEQ ID NO: 483896 - DNA, 122 bp, Homo sapiens
tacatgaagtcccaggagccttgtatatcataatgctgggcatcctggcatcagcaactacagctccagcaatggaggaggtcaggctctcttgcatgtccccaggaaaggggatgaatcca

SEQ ID NO: 483897 - DNA, 122 bp, Homo sapiens
aacattgaaaacaacgtaagaattactggtgtcactgtattctgggcattttccacttaacagtacttatctcaaagtgcttttaagtgggtgcatatagcttttagccatttagacatggt

SEQ ID NO: 483898 - DNA, 122 bp, Homo sapiens
gcacttatctgaagcaagacatctgacaaggatggctatgaagagaaaatgggcatcttacagtcacatagaatttgaacttgaattatggctgagttggatactagagaaaaagatagcct

SEQ ID NO: 483899 - DNA, 122 bp, Homo sapiens
agggtaaaacttgaggaaactgtgatttaaaaaaaatgaaacaagaaggaaataaatatacaggaggagagccagaggagcaacttggatgacatgcaagccatgaaagccagtggagatga

SEQ ID NO: 483900 - DNA, 122 bp, Homo sapiens
tgcagccctgcccctgttgcttggcagattacagccccgcccctgttgcttggcagattacagccccatggctgctttcacaggctgacattgagtttctgtggcttttcaatgcacagggt

SEQ ID NO: 483901 - DNA, 122 bp, Homo sapiens
taacataatttgcctctgagtgctttcaataatgaagactgcatatgaaatctttggttacagacagtctatgtataatggctttctccagtgatggttgtagtagcagtatacttggtgtg

SEQ ID NO: 483902 - DNA, 122 bp, Homo sapiens
agcctaattcttagaagtttttctaggtgattatgaacagaatgttcatagaaatatgtacagtaaaggccattctgataaggtctcagacagagatgaggaacaagacattgggaactgga

SEQ ID NO: 483903 - DNA, 122 bp, Homo sapiens
cagccttgaacttctggactcaagggatcctcttgcctcagcttcaagtagctatgattacaggcatgagccactgtgcccagctgcagtgaatcttgagagtagccaggagtgtccagtgg

SEQ ID NO: 483904 - DNA, 122 bp, Homo sapiens
ttgaatggttctggctcagggattcccatgagattgcagtcaagacgtcagccaggactacagtcctccaaaggcttgcctgggttgaaagggtctgcttccaagatggtgcccacttgagg

SEQ ID NO: 483905 - DNA, 122 bp, Homo sapiens
aacaaagaaatgttagcagttctggcaactgtatctcagaaaatagtgtcagtctagttacagacccatgaataaaatcagatagataataagtttggtgagtctctgagagagcagtactt

SEQ ID NO: 483906 - DNA, 122 bp, Homo sapiens
agaactgtaaccatgtaagtagggcgtggcctcgaccatgaaactggaagtattgcattacagctaacaaggtgacaaaagtgcttagtacagatgacagattctgtaaaaaaattttaaaa

SEQ ID NO: 483907 - DNA, 122 bp, Homo sapiens
ttcagtttgttccctataaaacatgacaagtaaaaagaggaaagcgtgtagaaatcactacaggagctaaccactgttaacatgccaatgttaaaggcagatgtagttatgaatatgcagat

SEQ ID NO: 483908 - DNA, 122 bp, Homo sapiens
tctcaaaaaaaaataaaataaaaaaaaaaaaaatgacaggttttggtgggtagcagactacagtcctcaggctggccacctgcttctgtaaataaagtttgattggaacacagccatgccta

SEQ ID NO: 483909 - DNA, 122 bp, Homo sapiens
gcagccacaggtagtacacaaacaaataggcatggctgtgttccaatcaaactttatttacagaagcaggtggccagcctgaggactgtagtctgctacccaccaaaacctgtcattttttt

SEQ ID NO: 483910 - DNA, 122 bp, Homo sapiens
gaaagccagtgaatccagttttggcaaaccttaatctccctgcacattggaaatgaattacaggcagctgttcaaactcttcaggcaggattcctgtggactttgagattcatgttacctca

SEQ ID NO: 483911 - DNA, 122 bp, Homo sapiens
aattaatgaaataaagtgagaagataagagaaaaaagtgaaaagaaatgaacaaagcctccaagaaatatgggactatgtaaaaagaccaaatgtacatttgattggtgtaccagaaagtga

SEQ ID NO: 483912 - DNA, 122 bp, Homo sapiens
aagtctgactgaggtcagtggtacccactaaataagtagtgagcacttactgtgtgattacagcactaaggatcacattggagttcttttgagcactaaggaccacattggagtccttttga

SEQ ID NO: 483913 - DNA, 122 bp, Homo sapiens
gaggaatcgtaggcagttgcaacatggctttattctctttctgggtgcaagctgtaggtacagcatcagcaggatagttacaccttttacagacaatagtggctctgatccaagcacaagct

SEQ ID NO: 483914 - DNA, 122 bp, Homo sapiens
gttaaacaggactgcctgtgctagctgagctatggggaataataggagggcaagtccccacactcttcagcagagcaggtgtaaggaagcagcaggaccctggagaagaccctcaagaggtg

SEQ ID NO: 483915 - DNA, 122 bp, Homo sapiens
tagggtctgaagaattccatttttacgtttctaacaaatttctggatgatgctgggattacagccccatgtgctgctgctggtctggggccacactctgagaacacagaaaagcctgggggt

SEQ ID NO: 483916 - DNA, 122 bp, Homo sapiens
agaagggtggcattttacagtctctttagtatcttgttataataaacagttgaattcttacagctgcttctacatccaaacttttttgttgaagtaagttgacttcacacagatacgcagtt

SEQ ID NO: 483917 - DNA, 122 bp, Homo sapiens
aagggtatcaccaagtggtggtgttaaacttgaggggtgcgggtggcagtgttttctctacagcataccagagattttcaaaatactgtttaggactcttggctgttaactcatttgatcct

SEQ ID NO: 483918 - DNA, 122 bp, Homo sapiens
taagaaaggctgactatacatatatgtcctatcggctatttctccttacagtagaggatacagcacctgtagactggaacatttactcacttgcagaccaggacatttactcactgcattta

SEQ ID NO: 483919 - DNA, 122 bp, Homo sapiens
ggacagctcactcaagggccttgtaattgtgctgaggagccagaaggcaatggacagatacagcagtttaaactggaagatagaaatttacatttttgaagggaaatggagaatcagtaggt

SEQ ID NO: 483920 - DNA, 122 bp, Homo sapiens
cgagtccaccaatcctctaaatgtggtcttcctttaattttctaggggattttaggattacaggcatcaaccagttgatcttgtatgcacagacagataactggaaaacagtcctttccatg

SEQ ID NO: 483921 - DNA, 122 bp, Homo sapiens
ctaactgattaaggaaggctgaggctttccttggagaaagaagagattcttgcttgtggacagtagcttcagcctgtgcctgtggggttctaggctgcccatgagcttcccttattgatggc

SEQ ID NO: 483922 - DNA, 122 bp, Homo sapiens
ctgaggctatttttaatgttttgaacctggacattgctgttactgttgatgtttcatgtacaccccactggttgatacagagcatggctccagagtcacagctacacacccagggactctgg

SEQ ID NO: 483923 - DNA, 122 bp, Homo sapiens
atggcaggaatccagtcaatctgtgaaataaagtatctgaatgcccaacggctagtattacaccaacctgtcatgagtaagtgtatcagtcaggtattgctgtgtagcaagtcaccccaaaa

SEQ ID NO: 483924 - DNA, 122 bp, Homo sapiens
atgactacccagattgatggtgcacccaacaggactttgcatttatgagctgataagtcacagtcactagctgagattaatctgtgtgacaccagaatgtgtctctatctaaaggaaaaggg

SEQ ID NO: 483925 - DNA, 122 bp, Homo sapiens
actcaatcccttgaggctcaggggatcctcctacctcagactcccacatagttggaattacaggcatgcaccactctacctggcatctgttttataggcttctgtgtgctttgaattatgaa

SEQ ID NO: 483926 - DNA, 122 bp, Homo sapiens
aaaaggttggcacagccttctgggttatctctaccttccattgtctttgagttatttttacagccctgtaagttgcagcaaactgataatgcagatgaccctcatccacagaaatacaagct

SEQ ID NO: 483927 - DNA, 122 bp, Homo sapiens
ctattatctaatacacagaccttgtgtagattttcccatttgtctcaataatgccctttacagcaaaagagaatccaagatcatgtgtggcatttggttgtcatctctcttcagtctcctgt

SEQ ID NO: 483928 - DNA, 122 bp, Homo sapiens
caggagtcagtgaagtttcctgccttgctgtctgcttgtttctgggacaacaggaggctgcaccccttggcaaattcaggcataagtaaaacttctgggctggaagctctagcagatgtacc

SEQ ID NO: 483929 - DNA, 122 bp, Homo sapiens
ttctcttttaaaattgggaatacctgttggtactgtgtgaccatggtattttctggtttacaatccatcctgcatgctcattttactacagtattatgagtgtgtgggggctgctgtgacag

SEQ ID NO: 483930 - DNA, 122 bp, Homo sapiens
ggtgcccacagtggtgagtgctttgtgatcgtagtgaatacattggacttttggtacttacagtcctttgatcactgaaaggggccatggcttcaggaatgatgcataaacccattctgtgc

SEQ ID NO: 483931 - DNA, 122 bp, Homo sapiens
tccctgccagtggctaggtagaggtaggggagaagggtcatcttggacatgctgcaaatacagcatttgctggtgttgacaccctcctggggctgtggtggcagactgctgtgtcaggagcc

SEQ ID NO: 483932 - DNA, 122 bp, Homo sapiens
actgcaactgattgccatttggaaaaagatacaaccaaaatccaaacctcacatcatatacagcagagtaaactccaaatgagtgagagggctaaacatacaaaataaaaacaaatactcac

SEQ ID NO: 483933 - DNA, 122 bp, Homo sapiens
tgagctgccttcttgtcatgtgcatgttcatggaggcaaggaaataaggctgttggtttacagttctgtcactggagatggccccaaagtgctaagtgaagattgcaccaaggttaccttga

SEQ ID NO: 483934 - DNA, 122 bp, Homo sapiens
tcaggattcagtttcagatcaattaattgcagaatttgaatttgagtctctcggagtttacagccttaatgtagaacaacaagaattctcagatgaaggtgatgaggtgtgtccagttactg

SEQ ID NO: 483935 - DNA, 122 bp, Homo sapiens
tgatgcactggagtgccagcagcagtggcagtgggctaggcaagactgccctcaggtttacagattctgtgcatgggcacctgtggtggcagagagagtaggacaatccccagacccccaaa

SEQ ID NO: 483936 - DNA, 122 bp, Homo sapiens
cctattgtccattaaactttatcataatcatgcatggtagatgatagtatcttccatttacaggtaagagctttggcacacacccccagacatttatatgaaaccccagaaagtcatgccca

SEQ ID NO: 483937 - DNA, 122 bp, Homo sapiens
aggaagaaatttgggcttgactgaagtaatgggggctgtctgtgaagctttgcggcagtacagcccaggtaatttgctgagcctgaagggtgtcagggtcagtccaagtgaaagcgaagaga

SEQ ID NO: 483938 - DNA, 122 bp, Homo sapiens
gtcattaggattgctggtgtgagcatgcatagtgtgttcagggagctgaaagcctatctacaagaagcaagaaaacttagtgaaataggaggaggccatggcctcaaaggccagtttcctgt

SEQ ID NO: 483939 - DNA, 122 bp, Homo sapiens
ttctgacagcttcaggctcctaggatttgcagacatcttgggaggagcactggacttctacaggttggcataaagatgatgtcaattttatgtaaatgtcaggggaaaagtgattcttactg

SEQ ID NO: 483940 - DNA, 122 bp, Homo sapiens
agagactgaggatcatggaaggctggacttgcctttaagataacaggagtgggcaaattacagcacttgggccaaatcagccaaaagggcagaccacccattttagtgtgagagctaagaat

SEQ ID NO: 483941 - DNA, 122 bp, Homo sapiens
ggcccatgtcctgcccctggagcacctagggcggggagggagggaagcagagggcacttacagcccagatgtttgaagtgatgagagacttgcctggtgtatctcctgatactgacagcgta

SEQ ID NO: 483942 - DNA, 122 bp, Homo sapiens
aagccattagactcaaaagttattgtcgttgaggcaagttggatcacagcatccaagttacagtctaggcttaggaacagcaagaaggtttcttgggcttcttgtctacatgccatgttgca

SEQ ID NO: 483943 - DNA, 122 bp, Homo sapiens
gcaggctgtacagcaagcatggtgccagcatctgcttctgatgaggcctcaggaggcttacagtcaaaggagaagacaaaggggaaccagtgtgtcacatggtgagacagggagtgagagag

SEQ ID NO: 483944 - DNA, 122 bp, Homo sapiens
gtcaaattttcttgactcagacctgtatcgcctatgtgtgcccatacatgaaggacagtacagcatggtggtatcagcaaagtttctgaatcagactgtccaagcctggatctcccctggga

SEQ ID NO: 483945 - DNA, 122 bp, Homo sapiens
tgctgcatttaggatattccatgtacaggtacaagcatttgaccacttccttatgttttacagtgcagttatcctcaagtattgacacattgaaatgattaaaataggccaggcatggtggc

SEQ ID NO: 483946 - DNA, 122 bp, Homo sapiens
gagagagagcaagggagggtgtagagaagagtattaactctgcatattgtgtattaactacaccttccttgtggaatccagtcttattctgattgcaacatgtttaagtgtgtgtttgcggg

SEQ ID NO: 483947 - DNA, 122 bp, Homo sapiens
ccaaacatatttaagctgcaggagcaagtgagtttcatgtcctgtaatgcctccaacagacagcacttaaggatggagacctaaatgccaagctcagtggtgttgcacagatgaagtgtggg

SEQ ID NO: 483948 - DNA, 122 bp, Homo sapiens
gtctcaaattcctggcttcaagtgatcctcctgccttggcctcccaaagtgttgggattacaggagtgagctaacacacctagactgtactagtagatttttaaattaaattaaaaacaaga

SEQ ID NO: 483949 - DNA, 122 bp, Homo sapiens
atacttttatatggtgagaaattaactcatctaactttgtaacactaaagcatacaattacagtcttacactgatgtgagtagcaaagcaaagattttaaatttagagcttgttatgcttcc

SEQ ID NO: 483950 - DNA, 122 bp, Homo sapiens
ttgaggacaaagagatggtaagtcctgtgcaagctggagggaactgccagcactcgcatacagcactagccttgctgccaccagctctgccccaggtccctcccagtgtgtatatgagaagg

SEQ ID NO: 483951 - DNA, 122 bp, Homo sapiens
aagcagggacccagataaaggtcaagggcactgaggagggagctggcactgcagagagtccacttcccaggcacagccttggccatgatgtttgaggacagctgcaggggctgtctggtgcc

SEQ ID NO: 483952 - DNA, 122 bp, Homo sapiens
agtccaaacagcggggctgagaagtaaggagatggctactgcctcaagctgtcaggattacagtagagagaaactcagggaaatgggagccctgagaagggacaccttacctggcctggaag

SEQ ID NO: 483953 - DNA, 122 bp, Homo sapiens
gtcttcaactcctgggctcaagtgatctacctgctttgggctcccaaggtgctaggattacaggcatgagccaaaaactggcagtcttttcagtactggcttctgtgcacttccagctccaa

SEQ ID NO: 483954 - DNA, 122 bp, Homo sapiens
gaaagcacagccgaatctcttccaatcctaaactctctgacacacaccattttcccactacagtcagctcataagaggatgaaaacagttcagttcataagtggatgaactacagtcagctc

SEQ ID NO: 483955 - DNA, 122 bp, Homo sapiens
cctgcagcttcctccacgcttccacactgaaaagcagggttagtttaaaaaaaggaattacagttctggagggaaacattaaatccctgaagttagaatttcctggtgagtacctgaagaga

SEQ ID NO: 483956 - DNA, 122 bp, Homo sapiens
gaaatgcctccgccgtgtttggatagcttgctattagcatgttcccatgagggacggatacagcagcctaagctgaggactcatgaggaaatgagagcccaggccccacccctgaggacgga

SEQ ID NO: 483957 - DNA, 122 bp, Homo sapiens
gctcggtcctgggctggggattctggctcccttggtgaaatgtcagtgtcctggggcctacagccctcatgaggaggctgggcctcatcaaggaggtacctttggatgcaggaatttttcca

SEQ ID NO: 483958 - DNA, 122 bp, Homo sapiens
gcttccacttaaaataagagcgagtgcttcacaatttaccaagtgactacacataaattacagcagctgatcctcagaatgacactgtgggatagacactaccatatctgttctaaaaagaa

SEQ ID NO: 483959 - DNA, 122 bp, Homo sapiens
gttggttaaactaggaatagtttggttccctgtgactcttgcctttcatatctatgtctacagcaactcagtatctagtacatcacagggactgcccagtaaatgattcagtgggtcattcc

SEQ ID NO: 483960 - DNA, 122 bp, Homo sapiens
gcaggaaacggaccgccgggggaagctcctgtcatcccagggtgggccaggctgggactacagtcatgtgcacagcatggctgagataatgagcaagactccaaggtccacccaggggcccg

SEQ ID NO: 483961 - DNA, 122 bp, Homo sapiens
gctgtaccaaatctaagccacacccattacattcaggatccaggacagacggacccattacaggacaagccaggcccatcacaggaattctgatgttaagaggacaagaaaccacacagagg

SEQ ID NO: 483962 - DNA, 122 bp, Homo sapiens
aactttgtttttaaaaaataaactcaccctgaggaactttttaacacagtatttcgactacaaggaaaaagcctattgcaagcaaatcttgaactgtatttaagtagggcttattttagcag

SEQ ID NO: 483963 - DNA, 122 bp, Homo sapiens
ggcatatactcactaatgttggaggagttgaaaatatacatatccacaataggaaaattacagtacatatctttggtgaggcatgaacatttacttaaagcaattagttttttgttgttgtt

SEQ ID NO: 483964 - DNA, 122 bp, Homo sapiens
tactgtgctcctgcagcccataagcgcttcggaggggtgcagttgctatggcaatgcctacagccatctgaattcctgctgcaccttctgggagaaaagagctcatgaagaggcattcggtg

SEQ ID NO: 483965 - DNA, 122 bp, Homo sapiens
cagggtccaggctgaatcaggcgtcctctctccgctgggacaccaggcaccgtctggcaacagctgatgcacttgtctgagtcttagtccacctgggcacaagcagagaaaggaccatgggt

SEQ ID NO: 483966 - DNA, 122 bp, Homo sapiens
ctctaccactgtgacctcattttaccttaatggactctctaaagaccctatttccaattacaggcacattgaagattagggcttcaacatatgaatttggtggtggagttgggcacaattca

SEQ ID NO: 483967 - DNA, 122 bp, Homo sapiens
cagaggatttcccttcaccattgcccttcagggatatttcagaagaggactgtagtgttacagctgtccacttccagatggtgcctgcatattgtgcagaaccatctgtaaacaaggcatgc

SEQ ID NO: 483968 - DNA, 122 bp, Homo sapiens
gcatggatatctgtaattatcaggactggggcagcacttggaagggcagcccatgacttacagtctacacccactaagttgtaaagagttgacatgtcctgtcccttggagtagatttatat

SEQ ID NO: 483969 - DNA, 122 bp, Homo sapiens
tcactcacttttcctgaatataaaaacagaaccaatgttttttcaaacattttcaagctacaagaacctgattttgtggatcactggtgctagggacaaacccaggtgttcttcatcttttt

SEQ ID NO: 483970 - DNA, 122 bp, Homo sapiens
agaagagaaaaagtactatcttctcctcatttattgcaggggtcatgaccaacactactacaagacaagacagaataaaggctgggcatggtagctcacacctctaatcccagcactttgga

SEQ ID NO: 483971 - DNA, 122 bp, Homo sapiens
aaaaaaaaatcagaggctgcctcatactctataactaaaaatgccacatgccaactgttacagccttttcctagttgctaggaaggctaagactccactataagatgcacccaccttaagtt

SEQ ID NO: 483972 - DNA, 122 bp, Homo sapiens
atggaggttacacatggactcagtaacatggacttccactcactgaggctaacctggctacagccactgccaagtgcccaatttgccagcagcagagaccagcactgagccctaaatatggc

SEQ ID NO: 483973 - DNA, 122 bp, Homo sapiens
cccttaagataccactgacaagtgttttgaaaaaaaaaaaaaaatcccattttgattgaacagtacatgagtccctcctgtacaaatgtgattggagtcaaaattctgccctactattggta

SEQ ID NO: 483974 - DNA, 122 bp, Homo sapiens
aggtggggcctagtgggaggtgactggatcatgggggtgcatttctcatgaatggtttaacagcattccacttggtactgtcctcttgagtgttcttgtgagatctgggtgtttaaaacgtg

SEQ ID NO: 483975 - DNA, 122 bp, Homo sapiens
caagccccttagggagggaggcgaagactcaagggacacagggccacagccaagggactacagcagttaccagaagccagaactagcaagaaggacttctccccagagctccggagggcagc

SEQ ID NO: 483976 - DNA, 122 bp, Homo sapiens
agagccgaacgaacacccactagcgggttaaatcacagcacaatgtttacaatacgtctacagtactctgtactttctcaattggctgaccaaccactggtcccaatcacactgaagagaga

SEQ ID NO: 483977 - DNA, 122 bp, Homo sapiens
aatgtgataaacagccctctacaaggtgaattgccaaataaatgttctacccaatttctacaggcactcagacattataccctcactgggcatcttggcagctcaaagaatggatttcagta

SEQ ID NO: 483978 - DNA, 122 bp, Homo sapiens
gtggcccttcgatcccctgctaggtgggtgtgttgccggcaaaacatgcagcagtaattacagcctcctgctaattgtactatctgggatctgggcttcttacattcattgattagcagaac

SEQ ID NO: 483979 - DNA, 122 bp, Homo sapiens
taaattataaaaactgaggatcatggcccctcaatcaatttccagacttgtgccagtttacagacccagaaacccttgaataaaggggaccctgggtccccttgagaaagaaccccactaca

SEQ ID NO: 483980 - DNA, 122 bp, Homo sapiens
acccgctatctggtggagatagagaaaggcagatggcttgaagatccaatttggagattacatccataggacttgctgatgatcacatgtggcagaggaagagccagtcctcaaatatggcc

SEQ ID NO: 483981 - DNA, 122 bp, Homo sapiens
gtcagctgatccatccattgcagggtccgcaagttatctccagcactgaacttagttttacagtagttatgttatccctaggaacaatctggggagcttcagactcctgcagccagaggtga

SEQ ID NO: 483982 - DNA, 122 bp, Homo sapiens
acagatgaggaaactaagatgcagagagatcagagatgggaagggacgtgctccgtgttacagctgtggagttgagggagctgggtccacagccctgtctcctgatcaccaggcctggctct

SEQ ID NO: 483983 - DNA, 122 bp, Homo sapiens
taagtgttagtgacatatacataggcagtacctggggcagttagtgacttatttggtttacagctctcagccagtatctgcctacagcctgatctgctactttctgagccaggctgtggttt

SEQ ID NO: 483984 - DNA, 122 bp, Homo sapiens
gcccaagggaggacacctcagtgctgcagccctgtgcttccggagcagggttccgggctacagcagattggatctgagttcctgtgtcagccctggctttcacttagctgtgtgatcttagg

SEQ ID NO: 483985 - DNA, 122 bp, Homo sapiens
taaaagcaatcagaattcatttttggacaagtcttaaactcaagtgacaatataattctacagccactattcccaagctgcacttaggtgtcccagggtggtgcagggaactcacaggggct

SEQ ID NO: 483986 - DNA, 122 bp, Homo sapiens
cccacctgggcctcccaaagttctgggattacaggtgtgagccaaagctaattattcttacaggcctgaaccactgtgcctggccaaagctaattattcttacaaaagtcaaaaagtttaaa

SEQ ID NO: 483987 - DNA, 122 bp, Homo sapiens
tgtctctacaaaaaatttaaaaattaactgagcacagtggtatccatccatctatagttacagctacttggaatgctgatgggagaagtgcttgagcccaggagtttgaggttgtagtgaac

SEQ ID NO: 483988 - DNA, 122 bp, Homo sapiens
attgtggggttattctgtggacatgtgccaatgagcacaacagtccaatatgtggcgttacagcagcatgaccagtgaaactcctctgttgccttaaagatttcatagaaagcaccaccaca

SEQ ID NO: 483989 - DNA, 122 bp, Homo sapiens
actttgacaggtacgttcctggattgaaggttgtgtcacattcaagtcacatatgacatacagccagtgatgaagttctgcactacactgtcatcatcactactagattttatttccccttg

SEQ ID NO: 483990 - DNA, 122 bp, Homo sapiens
acagggcaaaaggagggacctatgaggaaacaaaatataaaacagccaggtctcaatttacagttcattgtggtacagcacaaaagtccatccatgctcccaagagcaatttaacagaataa

SEQ ID NO: 483991 - DNA, 122 bp, Homo sapiens
tttgcatcttgttttgctcaagtgatccccctatgccagcctcctgagtaactgagattacaggtgcacaccacagtcagccatatatatgtgattttagtagagacaaggtcttgctacgt

SEQ ID NO: 483992 - DNA, 122 bp, Homo sapiens
gtctggaactcctgggctcaagtgatcctcctgcctcagtctcccaaacttctgggattacaagcatgaaccactgtgtgtagccccatgattttataatgtactggtatacggatacacca

SEQ ID NO: 483993 - DNA, 122 bp, Homo sapiens
gagagcttaacagtccccatgacagagatacagaaccagccagtccctatgacagggttacagtacctctagagaagccaacagaacagaataagaaagggtgtcttggcagtactgggaat

SEQ ID NO: 483994 - DNA, 122 bp, Homo sapiens
gatctgccttttgttgtcaagaaaatgagcaattgcaaattaaatgaaaagatcatattccagtacctacacaggaagatgaaatatagctgatcttatgctgtgcttatcatgttcctggt

SEQ ID NO: 483995 - DNA, 122 bp, Homo sapiens
tgtaacaacagtgttctggtggagggaataatctgccacttaatgaagagccagtgtgtacagctcttcattattcaatgctgggtgcttagtaagtgctcattaatatagtagcagtgacc

SEQ ID NO: 483996 - DNA, 122 bp, Homo sapiens
ctgtaacattttgcattcccaccagcactgaaagaaccttcctgttgcttcacatttttacaagcatttggttttgtcaatgcttagagttttagcaatgctaataagtatgttgtggtttt

SEQ ID NO: 483997 - DNA, 122 bp, Homo sapiens
gtccacagtgaaaattaagctccttcttcccttacccgagggcactttttactaatcttacagcatctctctgcattgtactatgaggacaagggtgggacagagaatgctgatgattcaat

SEQ ID NO: 483998 - DNA, 122 bp, Homo sapiens
acctcatgatctcatgttcacccattgtttcatgctgctcattttctaagtatagctttacagtcaatatgtaataccatgtaatagtggctaggaccagaaatcatgatgctcggttcaag

SEQ ID NO: 483999 - DNA, 122 bp, Homo sapiens
gataggaggtgtagggacaaagagaagctagagagaggttggttaagggatacaaagttacagctagatggaagaaataaattctagtgttctgcagcacagtggaatgaatatggtcaaca

SEQ ID NO: 484000 - DNA, 122 bp, Homo sapiens
aaaggggagcatagacaagtggaatacaatagagcacacagaaataaatccacatatttacagccatagagtttttacaaaggctctatgagccccaaacatctgagacaggtcccagtcag

SEQ ID NO: 484001 - DNA, 122 bp, Homo sapiens
gcctcgaactcctgacctcaagtgagccacccacctcagccttcgaaagtgctgggattacaggcatgagcctcaattcatattttagattaagagggtacatgtgtgggtttgttacaagg

SEQ ID NO: 484002 - DNA, 122 bp, Homo sapiens
gccttgaactcctggcctcaagtgatcctcccacctgcgcctcccaaagagctgggactacaggcatgaaccactgtacctgccctgaagtttattttttagaaggaactttaaatatatgt

SEQ ID NO: 484003 - DNA, 122 bp, Homo sapiens
acccagtgtttctgatgtctacctcacttttagaaagattgacataggtcttttaagctacagtcagtgactctactggatggtccaagtgtttcctaggagagaagcttttcaggaaatgg

SEQ ID NO: 484004 - DNA, 122 bp, Homo sapiens
aatagacctggctttagtttcaggtgttcagactgactacttttccactacatcatattacagtctatgagaataaaggatgtctactccaataaccacaattcaaggcaaaacagggcagg

SEQ ID NO: 484005 - DNA, 122 bp, Homo sapiens
tttaatcaaatctccaggcaaccttgtgaggtggctgttattatcatcatccccaatttacagcagtggaaactgtggtgtagggaggttaagtaacttgccccaagtcacagagctattaa

SEQ ID NO: 484006 - DNA, 122 bp, Homo sapiens
tggaggagaggcaacatttgaatacataattaatgataattttctggagataaaaatttacagcatatgaatttacaaattcagaaagaacaatgtatccaaggtaggataattgcattggt

SEQ ID NO: 484007 - DNA, 122 bp, Homo sapiens
gatggtcatgtactcctggcttcaatcctcctgcctcagccactcaaaatgctgggattacaggcataagccaccatacctggctacatcttaacagaaggttaagtacagtcagaataacc

SEQ ID NO: 484008 - DNA, 122 bp, Homo sapiens
cacccatctcagcctcccgaagtgctgggattacaggcataagccaccatgaccagcctacagttcttttttgcaactaccctgaagagcactgatgacaggaatttctcacaatgggaaga

SEQ ID NO: 484009 - DNA, 122 bp, Homo sapiens
cctgagcaacagagcgagattatgtctcaataaaaagaatgactcctatgttttgggctacaggaaggttggagctactgccatccaacaatgtctgaagcagatttgtggggaggagacca

SEQ ID NO: 484010 - DNA, 122 bp, Homo sapiens
gggagaacttacacttatctcctttagtacactgtccttgcttgaagaatgcacatactacagacttgggatctgcacctatgtcaaatggcatatggtatttgtattataatctgccaggc

SEQ ID NO: 484011 - DNA, 122 bp, Homo sapiens
atcatttaaaaaatcaattcattcatactatatatttatgtagaaaacttaatccatttacagtcagtgttattattgctaggtaaggctttgttcctgtcatattgttaattgttttctgg

SEQ ID NO: 484012 - DNA, 122 bp, Homo sapiens
ttttctttcttttttttccaggtatatcttctgtgtctctggagactttgttaaagtttacagcacagttacagaagagtgtgtacacatactgcatggacacagaaatctggtgactggaa

SEQ ID NO: 484013 - DNA, 122 bp, Homo sapiens
tcactgcaacctctgcctcccgggttcaagtgattctcgtgcctcagcctcccagtattacaggcacaggcacatggtgatgcctggctaatttttgtagtattagtagagatggggtttca

SEQ ID NO: 484014 - DNA, 122 bp, Homo sapiens
ggatttgctttgagcttttagagctcttaaaagcccacaaaaaggctattcgtagagccacagtcaacacatttggttatattgcaaaggccattgggtgagtgttatttacttccattaaa

SEQ ID NO: 484015 - DNA, 122 bp, Homo sapiens
cccaccctcatgaccccatttgaccttaatttacctccctaaaggcccagtctccaaatacagtcacactgggggttaggacttcaacatacagattttgaggggcatgcaatttagtccat

SEQ ID NO: 484016 - DNA, 122 bp, Homo sapiens
cagctctagccatggctaaaagggcccaagatatgtctcaggccactgctccagagggtacaagccataagcctaggcagcttccatgtggtattaagcctgcaggtgcagagagggtaaga

SEQ ID NO: 484017 - DNA, 122 bp, Homo sapiens
ggatttgtgcccaaggatttaatatctgattttccccacatttttaaatttatggctctacagccaatttaattggatttgtctttgttggggctaaactatttattatcatttgagaaggc

SEQ ID NO: 484018 - DNA, 122 bp, Homo sapiens
gtctcgagctcctgacctcaaatgatccacccaccttggtatcccaaagtactaggattacagacatgagccaccacaccaggcaacagtgtcatcttaagcaaggttttcttatctggtaa

SEQ ID NO: 484019 - DNA, 122 bp, Homo sapiens
ttcactcttcaattctgtgcacctgcaggcttaacacctcgtggaagccatcaaggcttacagcttgtgccctctgaagcagcagaggccagagcagtgcctggtgtgctttgagccaggtt

SEQ ID NO: 484020 - DNA, 122 bp, Homo sapiens
aaaaaaaaagagaactgggcctcatgaattcttccagacttcaacccttttatatggctacagggccctggtacttaacagagagcaaggcagtttccaattcagcattgaggatgatctga

SEQ ID NO: 484021 - DNA, 122 bp, Homo sapiens
aatgtttccaaaagaaataaggatggagaaatacatagattatacaatcttacatatttacagcagtgtagtgtagaaattaagagcacaagccctggagcaagcctgcctgggtcaaatat

SEQ ID NO: 484022 - DNA, 122 bp, Homo sapiens
gaactctctgtgagtcttttttttataaggaaactaatcccattcatgagggctctactacagctctctgcaccagcagagatggcattgtgtggatgccaccaaagttgctgcctgtgccc

SEQ ID NO: 484023 - DNA, 122 bp, Homo sapiens
ccaccaaaagatggctttgttgctctttccaaggcaccggatggttacattgtcaaatcacagcactcaggtattatacctgcaagggtaaggatttctagaatagtgagaataattgatga

SEQ ID NO: 484024 - DNA, 122 bp, Homo sapiens
tgaacaggagaatggccatctccaagccaaggagacagagctagaatagatcctttcttacagccctcagaaggaaccaaccctgtccacatgttgatcttacatttctagcctccagaact

SEQ ID NO: 484025 - DNA, 122 bp, Homo sapiens
ccagaccctgtttgcctgggtaaaagcagcagaggctgcagaacagcagatattggtgaacagcaaatgttgctgcctaattgttcctctggatgttttgtctcagaggagtacccggccat

SEQ ID NO: 484026 - DNA, 122 bp, Homo sapiens
ttgggtcagaacctaggagtgagattattggatcttacgataactgtatgtttaactttacaggaaactgcccagctgttttccatagtggcttcaccattttgcattgtcctggccgtgaa

SEQ ID NO: 484027 - DNA, 122 bp, Homo sapiens
ctaaagatgaattatgggttttgggtttccatttccttaaatcaacagcatgttcagttacagcacattgctaagggttaattttcaaaccaatgagtggtgagaagggctagtgaaaataa

SEQ ID NO: 484028 - DNA, 122 bp, Homo sapiens
aacagctagcttgtgtgtttttttgtttttgtttggtgagggtggttgtggatggtactacacctaaaggccaccatggatgttcacatagcactcatgcttgttgtgcagaccatatggag

SEQ ID NO: 484029 - DNA, 122 bp, Homo sapiens
gatggggctttagcattaaaatgaggtggaatttggctctttatgtcaacaggtgaactacaggccacaaagacagcttgtgtgctgcctctgtaagctggctgaaactgacctggggtctg

SEQ ID NO: 484030 - DNA, 122 bp, Homo sapiens
aaaggtataaatgattcataagggtcacgaaggaagcaatcctgggaagcctgctcattacaccccactgctctcttatgcttatgggggcagcatcttgaagcatgaagctgggcacaact

SEQ ID NO: 484031 - DNA, 122 bp, Homo sapiens
tcttgaactcctggactgaagcaatcctcctgactcaggtttcccaaagtgctgggattacaggtatgagccactgcacctggcccaggagcatattgtttaatttccatgtgtttgtgtag

SEQ ID NO: 484032 - DNA, 122 bp, Homo sapiens
cctccaggttccagaatggtagagccaccagtagcctacaatcttagcctggaaaagctacaggcattggattctaacagtgagagtggccacatggattatgcctggcaaagccattgggc

SEQ ID NO: 484033 - DNA, 122 bp, Homo sapiens
acagagagaggttgtgactagatcccctaggggagagggatagaggccacaggcagactacagcccctgcttctgcttggattgacattcaaggagtcaagttaatgcctcagttcggcatt

SEQ ID NO: 484034 - DNA, 122 bp, Homo sapiens
ggttgatttaggaattaagtttttcctttgttcatttgttttatagggcttttacctttacagtcatcatccttttatggtagcagagctggatccaaggaacactcttctggtggcactaa

SEQ ID NO: 484035 - DNA, 122 bp, Homo sapiens
ccatgtctgtctgttgccttgactaaaatctcaaaaggagttcatgccttattccatctacaatcaccttgttaccaggctcatgctgtggaaatggatagaatgtgttagataaccccagt

SEQ ID NO: 484036 - DNA, 122 bp, Homo sapiens
ctgtaataatttaccatagtttccaatcaatagaattatgaaagactctcctaaactttacagcactggaaaacagggcccacagactataatacaagagggagtgtattataataatggcc

SEQ ID NO: 484037 - DNA, 122 bp, Homo sapiens
gatccagccctggtttaattaactcctagttctttgtgtgtgaggtgtctggcctaaatacaatctcatccactggaattatgaaagggatccttggaagcagtttcaagaactccattgtg

SEQ ID NO: 484038 - DNA, 122 bp, Homo sapiens
tacaggctgtacaggaagcatggtgccggcatgcttctggtgagggccttaggaagcttacagtcatagcagaaggtgaggtgtgaacaggcacatcacatgacaaaagcaggagtgggggt

SEQ ID NO: 484039 - DNA, 122 bp, Homo sapiens
tacatttattccgtaaacctgtgtttccttgccaaccaataacatccatcagccatgttacaggcactcactgagctaagaaagagttctatttttagctggcctgtgggttggggctcccg

SEQ ID NO: 484040 - DNA, 122 bp, Homo sapiens
ccaccccagggcagtttgatccgaatctctgggaacatccaggcctaggtaacttttttacagcttcttggatgactgtaatctgtaacagggttgagaatcactgatctcataaaatctca

SEQ ID NO: 484041 - DNA, 122 bp, Homo sapiens
ccctgtggtttataggcaccaaagtacttctcaaatttcagtgcgcacaagtgcattttacaccatttattgcatgtaaagcagactgactgcttggggaccagaagaacatcttactcctc

SEQ ID NO: 484042 - DNA, 122 bp, Homo sapiens
ccgcccccaggagacctggggagcgtggccttgtctcccataagcattgcttctgatttacagcccttaaaaggcaggaaaccctctagaataatgactcatttttattacacatgggcttt

SEQ ID NO: 484043 - DNA, 122 bp, Homo sapiens
ctattactctatgagggttccaatttctgcatattcttgtctgtgcggtctttttgattacagccatcctggtgggtagaatgtgatatcttcttatggttttgtgtttctttttaaattaa

SEQ ID NO: 484044 - DNA, 122 bp, Homo sapiens
gcatttgatactccactcagtgcacacgttgtgaagtttaacaatagctttacatttttacagcactctggataaaaattcaactgaaataataaaatgtagtacactcttaacacgtgcca

SEQ ID NO: 484045 - DNA, 122 bp, Homo sapiens
tcagacctctgtggcctgagcctgggctctgggctttcagtaccggagtgagggtttttacagcagagacatttgctactttaagtacctgaatatgccctgggtctgggccagcacaccgg

SEQ ID NO: 484046 - DNA, 122 bp, Homo sapiens
gaagccccaatctctactcagatccagtccagtagaagagacagccaaggatattaattacagcaatgatactataattataagtgctgctgttaacagatatgcacactatgttaaggaag

SEQ ID NO: 484047 - DNA, 122 bp, Homo sapiens
caacacataactaaactcccaatagcttccttataaataataactgactgtggctcactacaataactggtgcttaaagtttttctccaggaactaggaggcagctcttgctcattaaagct

SEQ ID NO: 484048 - DNA, 122 bp, Homo sapiens
aaatatgatctgttgagtctataaccacataaccagtgccaaagtagggcattccatcaacagtcagcatcactgttgaagggctgcagtactcaccaagcacagttcccatgacacaaggg

SEQ ID NO: 484049 - DNA, 122 bp, Homo sapiens
gagggagtgctcagtgtggatggaggagcaacctggtgcaattcgctgcgttcacatctacagcctgtgcagcaaccccagtggggaattcaaggtgacagtgtagcaaatggtatcttgac

SEQ ID NO: 484050 - DNA, 122 bp, Homo sapiens
attgtatcaactgtcatagctcaacaatattaagctcttagtccagggactggtaaactacagctcatgggttaaattctatttgctgcttatttttataaataaagttttactgaaacaca

SEQ ID NO: 484051 - DNA, 122 bp, Homo sapiens
taaacatacttcaacagaaaaggtacagtaaaaatatggtataacagattaaaaatggtacatccatatagggaagttaccatgaatggaacttgcaggactggaagtgagtgagtgagtgg

SEQ ID NO: 484052 - DNA, 122 bp, Homo sapiens
ttatggtatgtgtgcgtggaggggcagaagtaggtgtggttgaagcatgacgctaccttacagttaaatctgtctgttagctgcccatgtccctgggctgtgaacttgagaagttttcttaa

SEQ ID NO: 484053 - DNA, 122 bp, Homo sapiens
tggtttaaggtgggcatttcaacgcacagacttcattaaaattgggtgagaagcatcttacaatagtttagattaatggatacagcaaagcaagggtttagaggcaaggatattgaagagtc

SEQ ID NO: 484054 - DNA, 122 bp, Homo sapiens
gggaggatcccttgagcccaggggtttgaggttgcagagataacacagaaacccaaaagtcaagcctagctggaaaagagctcagaagtgcctgagtagagtttggtcaagtagagaatttt

SEQ ID NO: 484055 - DNA, 122 bp, Homo sapiens
gctgtgttttttgagaggtgatatgaaacaggtgttgtggaacacccagcaggcaccctgcagtcaagcatattaatagttctatagcaagcaaatgtgtgagtatccacacagttggttac

SEQ ID NO: 484056 - DNA, 122 bp, Homo sapiens
aagtttgctgactttgcagtaaacaggtcatgtggaggtatagagctgtataaagatttacagggcatcagctctggtaatggaagctctgaaagtggataacccctttgtgtcttcaaaaa

SEQ ID NO: 484057 - DNA, 122 bp, Homo sapiens
gggaaggtttcaggccacactgtgagtgtgaggatgctgcaattttttggtatgggtctacagccctgaagattgagaattcttatataagatgactggagtacttttcctaaaatatagaa

SEQ ID NO: 484058 - DNA, 122 bp, Homo sapiens
taccatattattttttatgtttagatacacaaatacttaccgtcgtgttacaactgccaacagtattcagtactgtaccatgctgtacaggtttatggcctaggagcaacaggctccaccac

SEQ ID NO: 484059 - DNA, 122 bp, Homo sapiens
ggcaccccaagcagcctcagcacactgatcccaactggcacacatgtcgaaacgtgtttacaccccaccatatacatgggcctaggcagatttaaagtggcttctttttttttttttttttt

SEQ ID NO: 484060 - DNA, 122 bp, Homo sapiens
acaacaaccagatgctggtgggatgaacacacaggcttagaaccctggtcctgccacttacaagcactgaccaaacttctccaagccatttttgatctgcacagggggaggtgggagcaacg

SEQ ID NO: 484061 - DNA, 122 bp, Homo sapiens
actcttaacttgggggtactgggttctatccagagaggttgacagcaggagggtttgcaacagcacttgtcttgcagacacagtgaagtgctcagtgtgaatctgagccaacagtagatggg

SEQ ID NO: 484062 - DNA, 122 bp, Homo sapiens
tctgtattttaaaaatggtatctcaacaccagaaaaatattatcctaaaaatgtcagttacacttaccagcttgtgctgctgctgaactaattaaaacaggtgttggagccattaaccgaac

SEQ ID NO: 484063 - DNA, 122 bp, Homo sapiens
gaggtggggctggctgggaaatgttagcatcgtgggggcagatccctcatgaatggtttacagcatccacttggtgagaactgagctcttgctttgatttcacaggagatctggtcatttaa

SEQ ID NO: 484064 - DNA, 122 bp, Homo sapiens
catcatgaagcccaagagagatacctcaggagaattcagtcctgcttgatcttgggcttccagccccagaactgtgagaaaataaatgtctgctgtttaagctgccagtcaatggtgggtgc

SEQ ID NO: 484065 - DNA, 122 bp, Homo sapiens
atagagcccatgcatgccagatagaacaatagagaagagttaatagtgggcattcatttacaagatgttgggaaaactgaaatccaagcatgaggaaagtgaggtcacctaggaattagcag

SEQ ID NO: 484066 - DNA, 122 bp, Homo sapiens
tggctgattgcagagccccagggccttgagcaaacacaggcagtatccagggagaggttacagtaggccttgggtgagactcacagctgtcctggctttaggcctgacccagaacagttata

SEQ ID NO: 484067 - DNA, 122 bp, Homo sapiens
tcatctgaaaggatggctggccccaaacccaagggctgaatgcagcctatggaagctctacaggcagccatcagggaacacatcaagagagaaaactgactttacagagctttttcacatag

SEQ ID NO: 484068 - DNA, 122 bp, Homo sapiens
ccaacccctgcggctgcttttttgggctggcgttgagtgcctgtcgcttttgcacgtgcacagtacagactttcagtggatctaccattctgggtctggaggatggtggcccacttctcaca

SEQ ID NO: 484069 - DNA, 122 bp, Homo sapiens
tgcccaagaagtacagttttggtgagaaagcccagtgacagaaaatcaaaaaatgagaaacaggagtcaggccttaatgagcagtccatcagaaagtgatgtaatgggggcatagagtgaga

SEQ ID NO: 484070 - DNA, 122 bp, Homo sapiens
ataaccagctcaaaacatgccaaagaaatatattttggagtaacagtgtctggtgttctacagtcatattttggggcagtgtgtcttgagccctaatgtgagatttagcccttatatctggg

SEQ ID NO: 484071 - DNA, 122 bp, Homo sapiens
gagatggagcaggttttgaatgaggtgtggagggccactggggggccttttgtgagccttcagtccacatgtgtgctgttgtttgaacatgagttcttggtgctgatgacatttggatgaga

SEQ ID NO: 484072 - DNA, 122 bp, Homo sapiens
tacatagtgacaattgaaagtagcttttcctggttaaactatattgtggtaatgcagttacagcacaacaaagcagtacatgctgaccacccttagcagggaatgtgctttcgctcacctat

SEQ ID NO: 484073 - DNA, 122 bp, Homo sapiens
atcccactggggagatggcgggcagccgcctggcgcttgttgaattaagaagtgtgactacagtaattagcagcaagtatccaccacaggatagagcaaattcagggcagagctcagtcgtc

SEQ ID NO: 484074 - DNA, 122 bp, Homo sapiens
aagtagaatcaggagtcaactaggagagaatgtgaggtcaagaagcagggagagtatctacagacaacaacatcaagacaatctgctgtgaagatgagcagagaaatgagccagaaacacaa

SEQ ID NO: 484075 - DNA, 122 bp, Homo sapiens
aaagtgtctggtggtgcagagtgggcccataggctcaagggtttgtgacctggctttctacagccatgaactctggccaaagtccctggccagcacagggtccaatggagggagctcaagag

SEQ ID NO: 484076 - DNA, 122 bp, Homo sapiens
gccttgaaagtccagccaaggatagggctcgacaggtaccgagtgtgaacataaaatgtacagcactgtttgtcactgaaagattgaaaagtgaattatgaaagggtagacatgcgctccag

SEQ ID NO: 484077 - DNA, 122 bp, Homo sapiens
ctcagtcaagctgaatgcttgggcagtccttgcctgaaggaagacagaagctacgggagacaccaccttgaccccaggtgggcagggagcctgaagattcctgcctatggcaggatgggcca

SEQ ID NO: 484078 - DNA, 122 bp, Homo sapiens
attccgcttccctgctgtccaggatccgggagagagttgcagggattcctggattccctacaccagtcagatcatggggcagcagcaaggtgccatccaagatgtggagctaatggaagcag

SEQ ID NO: 484079 - DNA, 122 bp, Homo sapiens
taaatagtcattttagtaaaagcgcctcaaatcacccagcttgagagggctgtgagtttccagtcaggaccctcactggtccacaatggcagaatggttaccatgggaaggagggaagggtg

SEQ ID NO: 484080 - DNA, 122 bp, Homo sapiens
atgaaatcaccagtggctcacacgtggcgatgactcccccaccacctctaaataaaattacaggctggaggagacagcagctggaacacaagtctccccactgagaaacttgacccctcatt

SEQ ID NO: 484081 - DNA, 122 bp, Homo sapiens
ctggcaaacaatcaaattccctgacactggagcaaacttaagattgacaagcctcctctacagcacttgggagaacttgctgtcaatcagtctgcttcctgggggccacatgctgggaaact

SEQ ID NO: 484082 - DNA, 122 bp, Homo sapiens
acttgcaggtaagagcctgctgcagcccacgtggctgggtatatatttgattcttgtttacaggatgcttgtttacagaggcagaagctctctgtttccacagccaaaaggcagatccacgg

SEQ ID NO: 484083 - DNA, 122 bp, Homo sapiens
cgtcccatgccatgagagaagatgaagattcatgagattcttgtcttcttagtacacttacaagacatagactctggagcctggaagtgctgggtctgaccctggctttgccactgactggt

SEQ ID NO: 484084 - DNA, 122 bp, Homo sapiens
tttaccttgtcacagactaatggagatagcagaatagtgctagtccatagatcacacttacaggagtcctggccaagactcagctggccatgctcaatctgcttatctcttgctgggcatgt

SEQ ID NO: 484085 - DNA, 122 bp, Homo sapiens
ggcaaggtttctaatctctgatctgttttcttacctgcagaatggaaaaatgatatcttacagggttgttatgaaggtcaaatgagatagtgcatgcaagcatcaagcactgtgctggcaca

SEQ ID NO: 484086 - DNA, 122 bp, Homo sapiens
ccattcatttccatactggcttttgattatatgcagattcctagtagcatgccttacctacagcactatgtgcatttgctgtcacaataaagtatattttgtcttgcattgatgcagtactg

SEQ ID NO: 484087 - DNA, 122 bp, Homo sapiens
tctttcattctcagtgtcctgtccaggcacttccctggagctctctgagaaggtgagttacagctcccagtcatggccagtagagcatgtctctgtcctgtgcttttggacattactttttt

SEQ ID NO: 484088 - DNA, 122 bp, Homo sapiens
aagacagtatggggtgagtgggtgaaagattggtcaaaggcagggcagagcccagatctacagcaccttgtgggttgtggctgagagtttggattttattctgagagcagtgggaaaccact

SEQ ID NO: 484089 - DNA, 122 bp, Homo sapiens
aataataacaatacctgtctcataaagctgttgaaaggtttaaatgagatcatggatgtacagcatctggcataataaaaagttagctgttgctgtggtggtgatgacagtggttattttta

SEQ ID NO: 484090 - DNA, 122 bp, Homo sapiens
tctgggagaattggcccaagataaaaggccaaaaatgttaacaattagctgagccttacacaggtagtaatctttttgctggtggaggttcttgcttctgtgttaatggcttctgactgatc

SEQ ID NO: 484091 - DNA, 122 bp, Homo sapiens
cagagatggtattatagacaaaagtcacagcaaaagaaatggagatctattgtcgaggtacagtctcagtagttcagtatgaggttctagtgaggatgatgaagacttctaagttttaaatt

SEQ ID NO: 484092 - DNA, 122 bp, Homo sapiens
ggggactggtttagatacttttatagtagctcaggtgagaggcaatgagagtttgaattacagcataaacacagggctgggaggcaggagctaagtcaagaacttggacaaaagtggataca

SEQ ID NO: 484093 - DNA, 122 bp, Homo sapiens
agaactatgaaaaaatatatttgtgttgttttaagcctccaaatttgtaataatttgttacagcagctataggaaattcacacagggcagcctacaggagtttgtcagagcctgtatttatt

SEQ ID NO: 484094 - DNA, 122 bp, Homo sapiens
gagattggtgaaaagagcactgtgattcaagagttagataatttggcattctccattctacagctggatataaatgatgattccttatctgctgtgggaaatgttctttaacattgtaatgt

SEQ ID NO: 484095 - DNA, 122 bp, Homo sapiens
ctgagatccagagcattacccatgcagatttccctcaggacattctaactggtggatttacagcaagcagtctgagctcagtagagtatgctgctactgggagcactcactgtggcacatat

SEQ ID NO: 484096 - DNA, 122 bp, Homo sapiens
atggaggctatgcacaggcccaaaaatgtaaacttccctgtaccaatactaaccaggctacagctgttgctgattgcctaatctgccaaacagttaccaaagttgggtggcaaatatcacgt

SEQ ID NO: 484097 - DNA, 122 bp, Homo sapiens
agttcagcagcccaggtagctttgcagtctctctctcatgcaatggcttcagccgagcaacagctacaggtgctgcaagagaaacagcagcagcttttgaagcttcagcaacaggttggaga

SEQ ID NO: 484098 - DNA, 122 bp, Homo sapiens
tttaaagtggagccatacaagtgaagccaagggaatgagtgctctccagtgttgcatttacatcccagaacactgtaagcctgtctcagccagtgatgtttaaaacctgaagtgagcatgta

SEQ ID NO: 484099 - DNA, 122 bp, Homo sapiens
ttgaccactctgtgattagtgcaagggtaggttatagtcggtttacacatccagttgttacagttcattatgtatggagaactgttggtggaacttaaaatatgtaagagggcagctttagg

SEQ ID NO: 484100 - DNA, 122 bp, Homo sapiens
gaaacacccttggctgtggagttgcattcaccccaggttcaaatcctgctttggtgcttacaagtggtgaccttgggctaggtctgcatctgtagatggaaacagtgtcccttctgtgtttc

SEQ ID NO: 484101 - DNA, 122 bp, Homo sapiens
tgtggtgtactgagcagcagtatgaagtgataagagcatatactgtccctgttgcaactacagtcaggcaccatataacaaagttttggtcaatgagggatcacatacatgatagggtccca

SEQ ID NO: 484102 - DNA, 122 bp, Homo sapiens
agtttgtgtgtttgttttgtcacatgtctgaagtttgttaaagactttcaggttcatgtacagtcatgcagttggcagaagtgttctgaactgctcccaactagtctttttaagagaatgtg

SEQ ID NO: 484103 - DNA, 122 bp, Homo sapiens
aatttggcattgttcataacaacgggccgggattgatatttcaggaaataaccagagctacagcacatgtgtttttggaaagctgattttcacaggcagttagaagtgtaggattaaagtct

SEQ ID NO: 484104 - DNA, 122 bp, Homo sapiens
taaatggttccagtggtaacataatggacatctgagacttatactcatgaggtctacctacagtccattcccatttaggggaagagaaaggagaggaaatggccaagaagtccataagaagt

SEQ ID NO: 484105 - DNA, 122 bp, Homo sapiens
gtcttgaactcctgacctcggttgatctgcccgccttggcctcccaatgtgctgggattacaggcataagccactgtgcctagcctgtttctgttttaaaggaattgctaaatacgaaaaca

SEQ ID NO: 484106 - DNA, 122 bp, Homo sapiens
gaggccttgcaagaagtgtgcactatagcaagcactgttggagaatctactgcaggtaaacagcccttacacttggaaaaggaccctgtgggtcatggtgatgccagagtgcagtgattatg

SEQ ID NO: 484107 - DNA, 122 bp, Homo sapiens
cccaaaacgctgggattacaggcatgagccaccgcgcctggccagacatgagcatttttacaggaattgtttatttcatataaagattgtatgattattctacttagcagagaaactgactt

SEQ ID NO: 484108 - DNA, 122 bp, Homo sapiens
gtcttgaactcccgggctccagtaagtctcctgccttggcctcccaaaatgctgggactacaggcatgagctaccatgactaccctagatcattaaatctaaacttgaaaggcccttaaagg

SEQ ID NO: 484109 - DNA, 122 bp, Homo sapiens
caggaccctccctagaagtttgattcaacaggatctggtctttgcctttttaaacaaatacagccagatgattctcatggtgggaggttagacaaacactgcccctggccccccgaaagcac

SEQ ID NO: 484110 - DNA, 122 bp, Homo sapiens
tctaagtatagtttttgtttaagacaacctcatcagtttgaaaacatgtattttgaattacagcaccactttcaagagtataaaaaatagagaacattccaggtgggttataaatgcacaag

SEQ ID NO: 484111 - DNA, 122 bp, Homo sapiens
gctgtggtgaattccaagacaaggagtaagtatactgtggatgataaaaagaaagggttacagccaggcacagagcctggctaccaaagtccaccttgtgtgtttactctgccccagccccc

SEQ ID NO: 484112 - DNA, 122 bp, Homo sapiens
tcacaaaaggagaattatttcctccactttattgagcacttagtgtgaattaaatagttacagtctctgacttcagacctcaaagaggatacaggaagccatacagacagtgaccatagggc

SEQ ID NO: 484113 - DNA, 122 bp, Homo sapiens
ctgatgaaggtaagtcattggcaaagagggcaggtgtgaaccattggcagccaacagttacagcagcctggggagggatacacttgtccaggaaagagaatctgagtgcaccaaggaatcta

SEQ ID NO: 484114 - DNA, 122 bp, Homo sapiens
agcccgccatgtacctacagatccttggatggagagcttccaggacactcatcttagctacagtctcagatggttgaagcaaaacattgaaagtaatgatatggctctgttgcctggagaag

SEQ ID NO: 484115 - DNA, 122 bp, Homo sapiens
attggggttgggctcaacggggttgttgttctggtgtcagctggataactcacatgtgtacagtcaagtaccagatatttgacaagggtgactgttctggaatgatcttgcttggaacagat

SEQ ID NO: 484116 - DNA, 122 bp, Homo sapiens
gtcaagttacttaatttcaacgctgcagtttctgtacctgaattacagttcttgagattacagtacttgcctcatagttgctcaagcacttgctgaatttgaatgtaaaaaccacccggagc

SEQ ID NO: 484117 - DNA, 122 bp, Homo sapiens
aatcatgtgtaatactattgatgcttactgtgtaccactaggccatgtagaagcaccttacagtcagttactggttagataaaacatcacctcttagatcaaggagcactgcattgaaaata

SEQ ID NO: 484118 - DNA, 122 bp, Homo sapiens
tcaataaagctgttatttaaaaaaaatactagattgcagttttaaaatacttaaattttacagcttctaaaaaaggaaagttatttccaaccagaaaagtaaagtagaaaatggattctttg

SEQ ID NO: 484119 - DNA, 122 bp, Homo sapiens
cttcaacctctttgacagagcaggtcaaagcctgtgggtctcagccttcactgcagcttacaatcacccaggaaacttctgaaaaataaggtgtgggctgccccaggtcttttgttggagca

SEQ ID NO: 484120 - DNA, 122 bp, Homo sapiens
aaccctgactctgctgccctgagacctggccaggagtgaggtgaggtgttggaggtgctacaggaagcctgcctggagatcagggctcagatgcactggctcagggatgtggccatccatca

SEQ ID NO: 484121 - DNA, 122 bp, Homo sapiens
gtcttaaactcctggccttaagcaatcctgccacttcagcctcccaaagtgttgagattacaggcatcagctgccatacccagcatatgacaggttattaagctataactagcgttctacag

SEQ ID NO: 484122 - DNA, 122 bp, Homo sapiens
aaaagtacaaaactgtggaaaatgtggcactacatggaccttgagatggacacttgtttacagtatgagagctaaaatgaggagacagagcaccatctctgctgggaacagcaatgtcaggt

SEQ ID NO: 484123 - DNA, 122 bp, Homo sapiens
gcatgagaatcacttgatcctaagaggcagaggttgcagtgagcccagatcgtgccactgcactccagcctgggcaacagaatgagaatttgtctcaaaggaaaaacaaaacaaaccaaaaa

SEQ ID NO: 484124 - DNA, 122 bp, Homo sapiens
ctgcattcagaaaaatggacagggaggatagaaagacctgtttagaagcaacatcaattacagcaaagatagtgtaggcctttcagctgaactggcatttggtctgcaataatgacatggtc

SEQ ID NO: 484125 - DNA, 122 bp, Homo sapiens
attgcttttgtacagatggaatcattggctatcaggccaataagagagaaaatacaataacagcaaagcaccaaaccagtgcacaatgttggttaagtatggactgaactgtaagtgtgtgt

SEQ ID NO: 484126 - DNA, 122 bp, Homo sapiens
ggatccaatggtgatttccaaatttattttttccatgaaagaaggaattactccagcttacagtatctgaaatccagaggagtactacagtggtagatttaaaccctacccaagttaacctt

SEQ ID NO: 484127 - DNA, 122 bp, Homo sapiens
tcataagtacttgaagcacaaaattgctagacaattttacctcgctgagctatatatttacagcagtctgcaaaaccacccatggcagcataatgaagtggtgtgttcccatttatcgaaat

SEQ ID NO: 484128 - DNA, 122 bp, Homo sapiens
attctaagaatggctccttgagggtaaaaagctgtggagcaagggccttctgggatcctgcagtcacagtctaagattgtctcaagaagttgtacaccacaggccaccaatgacaagtcccc

SEQ ID NO: 484129 - DNA, 122 bp, Homo sapiens
ggaggcacagccacccaggtgagaccgtctgggctgctctcagaacacagagaaggtccacagcctgccctggtgatacaaggcaggcaaggccccacattggggcttagcctgagagggct

SEQ ID NO: 484130 - DNA, 122 bp, Homo sapiens
agccacgtatgatggttccacatcctggccaacacttgctatcgtctgtcttcttgtttacagctatcctagtggtatgaagttgtgtctcagttgtggttttaatttgcatttccttgatg

SEQ ID NO: 484131 - DNA, 122 bp, Homo sapiens
cacttgtaggagttgacaccatcgatgcaagtgccaccgtttctacaagggttgctctcacagtcattaatatctatgaaacaaagtaaagcaaaaaaagaactgaaggacttgtgaagcca

SEQ ID NO: 484132 - DNA, 122 bp, Homo sapiens
agaatataatttttaaaggaatgatctgttaattatgaaattaaagtgttaattgtattacagggatattggcaaaacaacacttaaggcatagctggtggggtttgggtgcactgtactta

SEQ ID NO: 484133 - DNA, 122 bp, Homo sapiens
aacctagaaatagcaaagaaacaaaacattagtactgttttaaacatgggtggacacttacagctcatttggcttaaatgatggcaggttatctgttagctgaggattcaagacatctgagg

SEQ ID NO: 484134 - DNA, 122 bp, Homo sapiens
agaggtgggaacaggctttcccactcggtgtcagtccccagaccaaagaccttgtgactacagtgtgctgcttgcttctccaattgaaggctggtggattttagatgcatgcctgcttgtat

SEQ ID NO: 484135 - DNA, 122 bp, Homo sapiens
agaaaacggaatcaaaaggaaacagccaaggctactgatgaacattttggcagcttaatacagcacttaactgcccagtgtagcacccatactgcagtgtggaatttaggttcctgtacttg

SEQ ID NO: 484136 - DNA, 122 bp, Homo sapiens
gcatatacatgatggaatactatgcagccataagaagaatgaaatcaatcctatactttacagcaacatggatgcagcttgtggccattatcctaagtaaatttatgaaaaaacagaaaacc

SEQ ID NO: 484137 - DNA, 122 bp, Homo sapiens
ctctgagtcctaactgcaaacccagtgtggcttggtaaagtagaccaggttttccccttacagcactactaaaagaataccaggctgagtgcagtggctcatgcctgtaggagggtcacttg

SEQ ID NO: 484138 - DNA, 122 bp, Homo sapiens
aaactcctgacctcaagtaatctgcccgccttggcctcctaacccaaagtgctgggattacaggcatgagccactgtgcccagaggacaacagacaattttaactgaaggctttcttggcgt

SEQ ID NO: 484139 - DNA, 122 bp, Homo sapiens
gacagtttgtgtgtccacttggctgagccatggtgcccagatatttggtaaacatcgttacaggcatttctgtgaagatgtttttgggtattactactcacatttaaaccagcagattgagg

SEQ ID NO: 484140 - DNA, 122 bp, Homo sapiens
ttatagttttcagaatgctattaaggtttttttttttacatttattaagttctacaattacagtacattgctgcaaacagtgttctgtggcagaaatataacatggtggctcacacctgtaa

SEQ ID NO: 484141 - DNA, 122 bp, Homo sapiens
gtccagagtttaggttcgtttccttcttactccagggcaaactcagtataaaataatctacaggatatctcctaactcagtttctaaggtaggttgatcaaagactgcaccaggacacaaga

SEQ ID NO: 484142 - DNA, 122 bp, Homo sapiens
aaggaggagcaacctctagtgactcctgtgagcagctgaggacttgttgagcagaacttacagcttaaagttaagggctaaagtgatagcccaggtggaaagaagaactaggtcagggcagg

SEQ ID NO: 484143 - DNA, 122 bp, Homo sapiens
tttccccccaaatgccctttgtagctgtttttaccccaactggcattgcatttgatattacagcctttgtaaagtgagagtctgggttaaaggtgtgtttacattcaggcaaagcctttttg

SEQ ID NO: 484144 - DNA, 122 bp, Homo sapiens
gtactttgatctatgttcttaccaaaatgtatggctcatttaatttaatagatcaaattacagtcacatgccacataatgatgtttggttaacaatgggatccatatatctatgcagtggtt

SEQ ID NO: 484145 - DNA, 122 bp, Homo sapiens
ggtgctccaggtacctataagtctgcctgggcttggagtgcaaaaggctctgctatactacagtctctgcacaagaaaggtggggtggctcaggctggtaacccagatcagcaggcactgca

SEQ ID NO: 484146 - DNA, 122 bp, Homo sapiens
ggggagtggaagaggccatgcagcagcacctcacctttggaaacaaagctgacactgttacagcatgccttaggaaagactggtaatcaggtttgggcctggcagtacagctagtgcgtcat

SEQ ID NO: 484147 - DNA, 122 bp, Homo sapiens
cagatgcttgaacttggatgcagaatcacagtgaacgaagtcacagatgcggactgactacagctgtactgttctgggcaactcagacaccacaagaggctctgccattggtaaggtgattt

SEQ ID NO: 484148 - DNA, 122 bp, Homo sapiens
tcctcgaggggaacttgaagtccagggcagaagagtggggaatgggcactggccggtctacagcaccagaggcctgccccagcccatgtgcacaagcaacacatcctgggattcttacagcc

SEQ ID NO: 484149 - DNA, 122 bp, Homo sapiens
gagaaatcgctgaaatgtgatttggaaaataatacttatttagctgtgtagctacctaaacagctgttacagtctgaatgcttgtgtccctcaacaactcatatgttgaaattctcaccccc

SEQ ID NO: 484150 - DNA, 122 bp, Homo sapiens
ttgtggcattttttccactgctatgttctcagggcgcctggacacgccaccaggaacttacaagtactcatggatgagtgttggggaaacagatggaaagaaaaggcctggggagggaggca

SEQ ID NO: 484151 - DNA, 122 bp, Homo sapiens
ccactgaattatgcacagtgcaaaacaaaacaaaacaaaaaaactgtgtttggctacatacagcagaagcctgactaatagtggcttaaacaaatagatgtatgttggagttggggacagat

SEQ ID NO: 484152 - DNA, 122 bp, Homo sapiens
gggaaataatcatgatcttgtaggactgtcataaggatcacataagctaacacatgtaaacagctgatgcatggtctggcatatgttagctttagctatgattttgccagattgttttttaa

SEQ ID NO: 484153 - DNA, 122 bp, Homo sapiens
tacctagtttattttgtgaatggtggtagtttgggcaaatctgactccgtttaagttttacatcaggtaggtgatggtgtactgctgaatctctattgtaagaagaaaagattaaaatgatg

SEQ ID NO: 484154 - DNA, 122 bp, Homo sapiens
ttttccgactgggatcatgggattgccatgtgcagccaggctccccagtgacgccatgtacagccaagcttgagactagagttcagatgagcctgacctggtctcaagggagccagagcccc

SEQ ID NO: 484155 - DNA, 122 bp, Homo sapiens
tcatggcatggagttgtagataaatgtgaggggtatgaatgacttagaggaacaattccacagtaatgccagttaggaacaatttctgctacaaataacagactattgacagatagttactt

SEQ ID NO: 484156 - DNA, 122 bp, Homo sapiens
tacggtgtgtgaggaggacttctaaggatcagatagtaaaaggggggttgccagagactacagggagaggaaaacagggagctactattgagcaggaataaagtttcagttatgcaagatga

SEQ ID NO: 484157 - DNA, 122 bp, Homo sapiens
aagctaagttgttggcatattttgaaagctggttaagggcttcatttgtggaagaaactacaccttttggtatatttggggaaggaaaatggaaagtgtatgctgtagaatgttaggaatca

SEQ ID NO: 484158 - DNA, 122 bp, Homo sapiens
aacttgcagagacaggtgaatacagagaccaacaacttaataggagcagagctacagatacagtaattggcaggaacacttcaaagacaattgacaaactgatggagattgaatgtggatca

SEQ ID NO: 484159 - DNA, 122 bp, Homo sapiens
aagcacatctctggatggcctggctgaactgagagagacatatcacatccgacgtggtcacagcactgcagccaaggctcagaatgacctccactcaccagatcacaaccagcgcagcttcc

SEQ ID NO: 484160 - DNA, 122 bp, Homo sapiens
agcacctacagtgagcacctatagtgaacacctgcagtggtacttgcaatgagcaccctacagttaatgacccacaaaagcacctgtagtgagcaccctgcaataagcacctgtagtgagca

SEQ ID NO: 484161 - DNA, 122 bp, Homo sapiens
ggagaagccctgcagtgggagagggcacttctaagcctgtgagggcagagagggcctttacaggcccccaaaattacagagatggctggtctgcagcagcagtttggatggctgcaggtgta

SEQ ID NO: 484162 - DNA, 122 bp, Homo sapiens
acctgttgctgtgcctaaatttccttgttacaggatgaagatcatattacctatctattacaggttgcaatgacttttgacactaactacctgcagttattgtcaactaaggaagctcacac

SEQ ID NO: 484163 - DNA, 122 bp, Homo sapiens
ataacctcaatcaaatgtcaaaaatgtccctgctcaggtttcctgatgcgtgggaatcaacagcatgtcaggtattatggaggacatggagctgttttctgccctgagctgtgactgcaggc

SEQ ID NO: 484164 - DNA, 122 bp, Homo sapiens
gggatactcaacctgtataactgtctttaaacaagggggaaattttgtcatctcacactacagcaagcccaggggtagaaggctcagagtgagttaatgaccctctcttcaccaagagccaa

SEQ ID NO: 484165 - DNA, 122 bp, Homo sapiens
agcaggggccatggtggaagccaggtggtgcctggcgttgaaggtggctcctcctggctacagtcactgtcccctggatgacaggccacacccagcactgatgggcatttgggttttccagg

SEQ ID NO: 484166 - DNA, 122 bp, Homo sapiens
cgtatttattgaggacttctgacatagcaatctgggtgtcacgtggccgtgcgatagttacagtccccaaggtggccttagccatgagagtgtatcatgggttcatactgtgcgttcttctc

SEQ ID NO: 484167 - DNA, 122 bp, Homo sapiens
tgtgttttgccatctaggccttcacctggtctgtggacttatacctgtgtgcttggtttacaggtccagtggttcttcagcccatgacagatgagaaggggctatattgaagggcaaagagg

SEQ ID NO: 484168 - DNA, 122 bp, Homo sapiens
ggcggccacccccaacacagcaggaccctgacctctgttggaagggaacagcgtggtatacaggagtgaacactggctggttctagctcttaacaacttccatgtgcacaaaatagaaagct

SEQ ID NO: 484169 - DNA, 122 bp, Homo sapiens
actcaccttcagtctgctgggaaagtcttgtttgcaaatctataacaaaagagaattctacagctcagtgcaggaacaatgaagagcctcaactaacagggtaaatgtcaggaaagcattaa

SEQ ID NO: 484170 - DNA, 122 bp, Homo sapiens
tccaatgaccaaacgaacattaaggactcattattagctataatgagagatccacttctacaagaccaccaccacaggaaaggaaacactgcagagatcctgtacagagcctccttcttgct

SEQ ID NO: 484171 - DNA, 122 bp, Homo sapiens
aagagaagcatgcaacaattagatccctcaccagctcgaaaactgttgaagcttcagctacagaacccacctgccatacatggatctggatctggatcttgtcagtgactttatgagagttt

SEQ ID NO: 484172 - DNA, 122 bp, Homo sapiens
aaagctgaaaaatcaagtcttaactgtatacatctgctaggactgccagtgtggccagtacagtcaagacaaatgattgtatcagatatatgagaattttaaaaaacaagcaagatatgtta

SEQ ID NO: 484173 - DNA, 122 bp, Homo sapiens
tctcgaactcctggactcaaagctatcttcctgcctcagcctcccaaagtgctggcattacaggtgtaagctaccatgccagcttaaaatttgtttgtttattttgagacagtgtctcgctc

SEQ ID NO: 484174 - DNA, 122 bp, Homo sapiens
gtctcaaactgctgaccttaagtaatccaaccaccttggcctcccaaagtcttgggattacaggcacaagccaccacactcagccttgtttttaggaactaggaatgaacaaaacagaacag

SEQ ID NO: 484175 - DNA, 122 bp, Homo sapiens
attctctggcttacctctccaaagatgactttggacttcttgagaatgatgattaaattacagtcatttttctacttgccagtccccaaacttgccatgtgctaggtagtcccatgccttcg

SEQ ID NO: 484176 - DNA, 122 bp, Homo sapiens
aaaattaaccatttaaaagtgtacaatttagtggcatttaagtaccttcacaaagctgtacagtcatcacctctgcttagttccagaacattttcattgtcccaaaaggaaaccctggactc

SEQ ID NO: 484177 - DNA, 122 bp, Homo sapiens
ctcctcagaaatgacttgtaagtttgtgcttttaattattatcattctcccctgaaattacaggcaaagcactcagtgatatttgaaacatcaattactggcctgcagccctctgctactgt

SEQ ID NO: 484178 - DNA, 122 bp, Homo sapiens
gctgccactctgttaaatgctggtcatctggaattgtttattctcctcatgttatcattacaagccagaaataaaagcatgaatattcaggtgctgtttacctaattcaggaaaacccctcc

SEQ ID NO: 484179 - DNA, 122 bp, Homo sapiens
gctgcaaatgtctcagagcctgaagaccaccaggcatgctgaggagctggaagatgtttacagcagtgtaccctgaatgccagcttgggaagagagatcctacaaaggtccatttgccctgt

SEQ ID NO: 484180 - DNA, 122 bp, Homo sapiens
aggtgcgaatcacagccactcctcataagtcatccgaaaagcccccacaaactttaattacagctgccaaggtcatgtgatttgccctcacacctgtttggagagcatgcagatattttagt

SEQ ID NO: 484181 - DNA, 122 bp, Homo sapiens
tcttgaatgattttcctctataccacactcactgtcgatgatttcatggttttctcagtacagtagtctgggatatacaacttaaaccaggtcttatattcagagtttggggtttttgccct

SEQ ID NO: 484182 - DNA, 122 bp, Homo sapiens
aaaaaaaaaagagggtgacttttggtaggcaataatgcctggcacaatttctaccatttacaggctgatgactctgggaaagttgcttagcacctctgagcctctactcccccatctgtaaa

SEQ ID NO: 484183 - DNA, 122 bp, Homo sapiens
ttaatgtctctggacctcaacttgctcatctgtataatggaaatactaactatgctcttacagacattggggaaaaacatgataaggtgttcatgctcttcagtatcaccaatagctgctct

SEQ ID NO: 484184 - DNA, 122 bp, Homo sapiens
atatgccagcagtggtaacccaaaatgtcaccagacattgccaaatgtcccatgggagaacagtcatctccagttgagaccactgactgctctagaatagaaaaaaagaagctccaggacta

SEQ ID NO: 484185 - DNA, 122 bp, Homo sapiens
gtgggccagacccagggtccccatgctgtgtgccgcctagggagttggtgccctgtgttccagccactctagctgtggctgaaaggagccaacatagagctcaggctgtggcttcagagggt

SEQ ID NO: 484186 - DNA, 122 bp, Homo sapiens
tgctgtatgtggaggagacattacaggtaattggtctcacaagtgccaaaatatacgctacagcaggtgtccccagctactgggccagggactggtacttgtctgtagcctattaggagcca

SEQ ID NO: 484187 - DNA, 122 bp, Homo sapiens
tgcatgggagaaaaaaaatcttaatttggattggagagttggaagacaatgaaacacatacagtcagtggcagatattattggtggaaaagcagaagtcctgttgcagagtccttgcagact

SEQ ID NO: 484188 - DNA, 122 bp, Homo sapiens
ctttctttggcagcccagcagtgtgtctgtgcaagtgttttagtattagtccaggaattacagcacttgctacagagctggctagtagcttccacaaccagaattaagtgacaagtgtggaa

SEQ ID NO: 484189 - DNA, 122 bp, Homo sapiens
gtgtgttcgtggtctcgctgacttcaaggatggagccgcagaccttggaaatgagtgttacagctcttaaagactgcatggacccaaagagtgagtggcagcaagatttgctgtgaagagcc

SEQ ID NO: 484190 - DNA, 122 bp, Homo sapiens
gggtgaccgcttgatttacagtgggcctcctgggtagggaaaattagtccatcccatttacagctacttccaatgcagctgtgtcaggggagagagaagaaaggacatggaagagagcgtag

SEQ ID NO: 484191 - DNA, 122 bp, Homo sapiens
aaatggctggggatgtttaatctcttgacctggatggtggttacaaggatgtacgtcttacagttcattaagctgtgcatttgttttgtgtggttttctgactttatataatatttgactat

SEQ ID NO: 484192 - DNA, 122 bp, Homo sapiens
gggatgtctcttgtatgcaaatatggatggaaaaggaagaacaagtgcaagaaattaatacagcacatgttatttggaatattctgtgtttaaaagtagacatctgataggcttttattcta

SEQ ID NO: 484193 - DNA, 122 bp, Homo sapiens
ttaacctctttaaaggccccatttcaaaatacaatcacatttttgaggtactaggggttacagcttcaatatataaattcagggggccataataatgcagtccataacaactatatgtatgg

SEQ ID NO: 484194 - DNA, 122 bp, Homo sapiens
gcccagggtccccctgctgtgtgcagcctagggacttggtgccctgcgtcccagccactacagctgtggctaaaaggagtgaaggttcacttggcccatggcttcagaaggtgcaagcccca

SEQ ID NO: 484195 - DNA, 122 bp, Homo sapiens
ccattgacctttaaatgtattatttgttgcaagaaaatgtagaagtccaaggaaactctacagggactttgctacttgaggtttgataacctgtccatgagtttcctaagtacagtgaattt

SEQ ID NO: 484196 - DNA, 122 bp, Homo sapiens
ttaggggctcaggaaccacatctggagggaatcaatctggacttaatagaaattaggttacagcaagtaatacaattagtttggttttagttttgggttttttgtttgtttgttttttgaga

SEQ ID NO: 484197 - DNA, 122 bp, Homo sapiens
tgatacatttgtccaaaccaaagagtatacaacaccgagaatgaactccaatgtaaactacagacattgggtgataatgatgtatcagtgtaggttcactgattgtgacaaagatcatcctc

SEQ ID NO: 484198 - DNA, 122 bp, Homo sapiens
aatttctgggtaagcgaatgtgaggtcatcgtataagaaattaaagccacagtcaaattacaagccagatgcttctgtgtttagtgtccagttcagcatactttttctgtagcgggccagag

SEQ ID NO: 484199 - DNA, 122 bp, Homo sapiens
ggaacatgacacagaacaacattttgctagatatgtgaatgaagtattatttataatttacagctcacaatgattactttgggttgctgtgaaatgttgaccagcagcttttctgctgctgt

SEQ ID NO: 484200 - DNA, 122 bp, Homo sapiens
gctgatgatgtgaaattttaggactgtgttattggagaggccttagagatttgaattttacagccagaagcagccaacccagtgggattgcccatgtctgcccagtttccctgaactcccct

SEQ ID NO: 484201 - DNA, 122 bp, Homo sapiens
aacacacactgaggcctgttggggggtgggggtggggacttgggggagggagagcaacaacagctactggatgctaggcttcctaccaaggtgatgggttgatctgtgctgtaaaccaccat

SEQ ID NO: 484202 - DNA, 122 bp, Homo sapiens
gccgccatcttaaacatgattggcactactgcaggtatctatgtctgcagctcgattttacaggctgctcttggttagaaaggaaagtaattcagggctgcttttcattaaaaagaaaagcc

SEQ ID NO: 484203 - DNA, 122 bp, Homo sapiens
tgagtggcagtagggaagattacattggcacccaggtgatccactgcgtgtcttttgttacacccctgcccaatcttgacaacaaatgtccaagtgtagttctgtgttaacatggtagccag

SEQ ID NO: 484204 - DNA, 122 bp, Homo sapiens
agaagcaagtcagaagtcccagccccactcaaagggaggaaattacacagagtatgattactggaggcagggattactgagaccatctgagagtttgccttcaagaaggaacttggaattca

SEQ ID NO: 484205 - DNA, 122 bp, Homo sapiens
gtcaaataaaattgttcccaggaaggggaaagaaagggttctcttgccatcgtgactttacagtcatcatgttggcagagctttgtggtggaggacaatgattttctactgcccttgttgag

SEQ ID NO: 484206 - DNA, 122 bp, Homo sapiens
ctcttttgcttaatacaataatgataaaatactcaaatttctatcaataatcatgccaaacagcaagtgcccatctgggaggcactggaggttccagcatcatttctgatctgagaacaccc

SEQ ID NO: 484207 - DNA, 122 bp, Homo sapiens
ctgtcttcctggctccatagagtcacttccagactttttctctgtgtggtctggaaattacagtcctgcaaattagctgctcaactagatctaaggtcaatcttggattttcactgcccttg

SEQ ID NO: 484208 - DNA, 122 bp, Homo sapiens
aatggcctgtgaaactatccgggcctggagccatttgtagctttgttgttgtatcagttacagtcctaggcatctatagctatgatcagtggtatagcaggtgtgtagtgtaataggaggga

SEQ ID NO: 484209 - DNA, 122 bp, Homo sapiens
gaatacaggcatgagccaccgcacccagccacaatggtaaaatttgtattgtgtattttacagtaataaatatgccaaaggctaaaaaaaataaaggtacagtggccagaggaagaagggcc

SEQ ID NO: 484210 - DNA, 122 bp, Homo sapiens
gcaggaaagaggttgctctctcctacatttattctctgcagaattgtgtaagtggctcaacagcagtaagccaagaatctctctaaaactgtcatagttatagttgtacttagattttgact

SEQ ID NO: 484211 - DNA, 122 bp, Homo sapiens
aatgtaagtggatatatgtttgcatgtgtatgtgtgtgtagaagtacaaccaaaggcttacagcacctgtctctgagagctgaggtcactctgctatttgttttcacacatttctgaatttt

SEQ ID NO: 484212 - DNA, 122 bp, Homo sapiens
gttggaacaaatagattgttagtgttcatttatagatacagctcaaccacatactctttacaagagataaacctaaaatacaaggaaacagaagaaggtaaaggtaaaaagatggacaaaag

SEQ ID NO: 484213 - DNA, 122 bp, Homo sapiens
gtgcctgaagatggacttgattcaaatggtttacatatttagtgggtaagggatatgttacagtaccccacctgtaagttatttattagccctaattgtgtttgatttcagacaaaattaac

SEQ ID NO: 484214 - DNA, 122 bp, Homo sapiens
cttatatttacttttgttctctcccttgattattaacggcatttaaaatttttgatattacagccttgacaattattgctttaaagaattgtgattaactttaagcttcaatgtctagatac

SEQ ID NO: 484215 - DNA, 122 bp, Homo sapiens
gtaatctcatttatccttgcatcagcctctgaagtggacatgaccatgatttccattttacaggcaaagcaactgtgtggctcagagatgttaaactacttgtccaaagttgcagaactgtt

SEQ ID NO: 484216 - DNA, 122 bp, Homo sapiens
aaagtgcttcaagagcttccactccactggtctggcttcccttcaaccagaaagggggcacaggcacccagcaagagcctgtgctggtgacacagaatgttctttctagagcccaggggaca

SEQ ID NO: 484217 - DNA, 122 bp, Homo sapiens
attcttctgtgtttcttattttcagatacaccatgtttattaaacatgaaaaagcaattacaggaaagcaaacattcagataaacaaaagaggcagtcagctagttcccaggcaaaatttcc

SEQ ID NO: 484218 - DNA, 122 bp, Homo sapiens
aaggcccaggtttcctgcaggagctgcttcggagtggggaggtagggcttctgccaccaacagcacttggcagttgtaatctagaggcagctgctctgagggaagagccaggagactcgtga

SEQ ID NO: 484219 - DNA, 122 bp, Homo sapiens
ggtacattatcgcactgacctcaagaccactggcaacggggacagctcagcatgctgctacagccaagcctccacctcatatcagatggagcaaaggaaggctcagagcaaagcagggatca

SEQ ID NO: 484220 - DNA, 122 bp, Homo sapiens
ggaaactgaactgaggggagtgagccgcccttccactgcccagcactcacctttgctttacaggaacaagagctgtgcaaaccagcatgtagagatttctgcatttatagcattagcactct

SEQ ID NO: 484221 - DNA, 122 bp, Homo sapiens
tcccttcctccagacactcccctggcaactgtgtccagtctggggctcccaggccatctacaggctgagacccagagttacctctgaactcaaaacttagcaaaaaagaatttttattttca

SEQ ID NO: 484222 - DNA, 122 bp, Homo sapiens
ctggcagggcacacacctcagctgggccctgtggcaggtgaacccctggagggaaagaaacaagactcattcaacacagacccagcctcaggcccaggaagactgtaggggttggggaggta

SEQ ID NO: 484223 - DNA, 122 bp, Homo sapiens
agcaggcccagggagagccctgggtggacagggccactgtgacccaggaagccagagccacagcctaaaggaggcccaggctgccacatgatactggccccaaagagaaagccccatggcct

SEQ ID NO: 484224 - DNA, 122 bp, Homo sapiens
aatgtgtattctataactcttggatggatagttctgtaactgttttgtccatttgccctacagtgcattttaatctgatgtttacttactgattttctgtctgcatgatctattcatttctg

SEQ ID NO: 484225 - DNA, 122 bp, Homo sapiens
gtctcaaactccagacctcaagttatccaccagcctcgccctcccaaagtgctgggattacaggcatgagccactgtgcccagctgagaaagagtttttttaaaaagtaatatttagttaga

SEQ ID NO: 484226 - DNA, 122 bp, Homo sapiens
ggcaaccaagacaataaaggcctctgcttcagggttgttcttttcagattcctttagttacagcagcttcagtttagaagctcagaggcatgagtcattccttgcactatcataaaaaccca

SEQ ID NO: 484227 - DNA, 122 bp, Homo sapiens
aaggcagaaatctacatctgaactcttactctatcacagcacagtgcttctcagaggttacagcacactccttctcaggtggtcattctaagaggacatgacaaagaaaacactcaacagag

SEQ ID NO: 484228 - DNA, 122 bp, Homo sapiens
cttcccagccaagttgagttcccacctcaatacagctgcatgagtgaccccaggaatgaacagtcagctgtagaaccatgtagctaagcccagccaacctccagagtaaaaactaataaact

SEQ ID NO: 484229 - DNA, 122 bp, Homo sapiens
gcaaactgtgagcgttcctttgccacatcgtgtgtaaaccctaattgcgaagcttcattacaagacaggtgactttgctttcagagaaggttgcccaagtaaaaagaatagctcctttttgg

SEQ ID NO: 484230 - DNA, 122 bp, Homo sapiens
tctgggtacccagcatctaaaactcttcctatttggagggaattcaaagatagggggaaacagcaccctaccaaccaccccagtggccagagttgggggtgagtggcagacattccctctcg

SEQ ID NO: 484231 - DNA, 122 bp, Homo sapiens
gtcacagcagcagggccaagtcctaagaaaatcagcacctgctgcaggagctggtgtttacaatagtcccatctactgtgaaacctgggctaacaaggaagaggatggtgctaacatggtca

SEQ ID NO: 484232 - DNA, 122 bp, Homo sapiens
tcgatctcctgacctcatttcgtgatccacctgccttggcctcccaaagtgctgggattacaggcatgagccactgagcctggcctggtgaattaattttaattctggctgggcgtggtggc

SEQ ID NO: 484233 - DNA, 122 bp, Homo sapiens
tgacagcctcccctgtcccctgcccgtcaggaacaagcagaacaaactgagctccacttacagtctctcccactttgagaaggtctgtttaggaatggcactccaaccagaaactgacctcc

SEQ ID NO: 484234 - DNA, 122 bp, Homo sapiens
accaagggaaaggatgtgagttattgattagagctggtgggaagggggtaagctgttttacagtaactaggggcaaggaggaacaggaaagttaagtttgagaacaaaggacaaggaagtta

SEQ ID NO: 484235 - DNA, 122 bp, Homo sapiens
tgagatgtgattatccatgctagcaagggaggagtgagtgtaattctttccaaaaatttacactcttcagtttgtggagagaatgcaggtgtttctgtttgttttttgagagggagtctcgc

SEQ ID NO: 484236 - DNA, 122 bp, Homo sapiens
attaatcatttgaacagcacaagttgttgagaagatgaatgagagaaggcacaagatgcacagtcatttagcatggtgcctaactcttgatgtgggtctcaaaaatgttgttgaaagtgaat

SEQ ID NO: 484237 - DNA, 122 bp, Homo sapiens
taaagcactttgcaccatgtctggcacatagcgttcaataaatattggctactattattacaatccttacctcaaggactgtgctgagaagtcaacatctttaagaaaactgcccaggctaa

SEQ ID NO: 484238 - DNA, 122 bp, Homo sapiens
gctcctccacagggattttaagaagcactgtcttactggataaggaggcatttcaacttacagcaacagtgtgtccagtgacaagggatgcaatgttatgtggcatgttggaaaaacagagt

SEQ ID NO: 484239 - DNA, 122 bp, Homo sapiens
gatagaattgtcccaggatgacagtacagataggcagtctaatccttgttctgcctcctacaggacatagctttggcttgaccctctgctgctgtgagctgcactctgtgaaatgggatcat

SEQ ID NO: 484240 - DNA, 122 bp, Homo sapiens
aaattacagattatgattgttgttgctttaaggcaccatgttttggggtaatctgtaatacagcagtagattactggaacaaggaataggtaagataatgcacatgaagtgcttagcaccgg

SEQ ID NO: 484241 - DNA, 122 bp, Homo sapiens
acaataacaacatttaggagtctgaaaaccaagtcaatgaaaaatctgttaaagacattacagttgtttagtctggaaaagagatttctccagggtgacatgataactgtcttcaaaaattg

SEQ ID NO: 484242 - DNA, 122 bp, Homo sapiens
tacctggccaaattttaaaatgctaccgtatctgtgtatgaatatgtgtgaataaatttacagactctagggtgtaattcacagggtagaccaagtcaagagtcagaggatcagaagcttgg

SEQ ID NO: 484243 - DNA, 122 bp, Homo sapiens
agaaagtcacaaatcactacataaggacctgctgtaaccagtctgacctcatcttgattacagctgcaaagaccctatttccaaatagagccacattctgaggatccagggtgacaaatttt

SEQ ID NO: 484244 - DNA, 122 bp, Homo sapiens
gaaaatggtaataccgatcctggagattcattgtgagactttagtgatttgatgtgtttacagttgcctggcacctcatagaggttcaaagttaatttcagaaatagtcttcatgttcttct

SEQ ID NO: 484245 - DNA, 122 bp, Homo sapiens
gaacggcatgtgtgtggggacttgtgggcctttgacggtggaaagtatttattcattttacaggcagagcatgagaccagagaggaaaaatgagttatctcaggttgcacagtgagacagag

SEQ ID NO: 484246 - DNA, 122 bp, Homo sapiens
agctctgagccctgctaggctgagcgacatcagatggctgctgtggatcttcaccaactacagccaacaacagcaaaagtaaatgctatataaccagcacccatgccagctctgcacaccat

SEQ ID NO: 484247 - DNA, 122 bp, Homo sapiens
tccagccctctgtgctacacctgaaagaacaagagtcccattgtgctcgttgcctgtttacagctgccagaatgggacatccctgagggcatcattagcagagccagcaaggaatggaattc

SEQ ID NO: 484248 - DNA, 122 bp, Homo sapiens
gcataatgttttcaagggtcatccatgttgtagcatgtatcagtacttcattactttttacagtcaaataatattccactgtgtggatgtgtcatattttgtttattcattcattagttaat

SEQ ID NO: 484249 - DNA, 122 bp, Homo sapiens
agagcattctggctgaatacaagattcataatgccgatgtgactctacgtagtgatgctacagctgatgacctcattgatgtggtggaaggaaacaggtactgactgagtgtgcagtctgtg

SEQ ID NO: 484250 - DNA, 122 bp, Homo sapiens
agtggcgaggagcagcgctggccacctctgatgccagctgtcatgttatcaccctgtttacagcccacacataagtggtttggccaagactgcagtcaggggtctgatgggggcctctgcct

SEQ ID NO: 484251 - DNA, 122 bp, Homo sapiens
atgaattaataaataaataaatatttcagtccttcccctacaaggacattttcttatctacagtacagttgtcaaaaccaagacatttacattgctacaatattgttattgagtgtttaaat

SEQ ID NO: 484252 - DNA, 122 bp, Homo sapiens
caaattctggggatggtagcaacagagcagtaccttgcttgggttttaatacctcacttacaggacttatttgatcctctggcattaaactcacaatggattttctttcaaacagaaaatca

SEQ ID NO: 484253 - DNA, 122 bp, Homo sapiens
ccagaatccagactaaaatacagaatgagtcccccactacccatcacactcaatgtgctacagcagctataggatcagttgtagatttaccaactatactgaaaagtgtgcttttgcaggat

SEQ ID NO: 484254 - DNA, 122 bp, Homo sapiens
agtgcagtcagggaatatctgaatctaagagctggccagacacagggtatagcagaattacaagcatagaggatgctatgcagtaggatgtaaagctcattacagcccatttttaagaaaag

SEQ ID NO: 484255 - DNA, 122 bp, Homo sapiens
acagaaatctgggctgaggctgcttcctattacatggtgtttaaagctatttttcatttacagcctagaagcactggccatatgagtgcttgtctaatcccctagaattgtgaggtcttaga

SEQ ID NO: 484256 - DNA, 122 bp, Homo sapiens
tgtgcatacatgcgcatgtgaacagtccatggagcttaatcccctggaggagggattctacagcatcacatgtagaaggcattctgctcagagaatggcctccatttttccgggaacgcacc

SEQ ID NO: 484257 - DNA, 122 bp, Homo sapiens
atgtacccatacgggaaaggccgcgtgaagatggagacagagatgggggtgatgcttctacaggcaaggggcctcagagatcaccagcaaaccccagaagctggagagaggcctggcacaga

SEQ ID NO: 484258 - DNA, 122 bp, Homo sapiens
agtgtagaatttggggctcgccctgttggttcctccggtgtgaaggctgcgttgtctctgcatcctgttgtgggtgagcaccctgttgctggtgagcacctgcagtcagttccaggatgctg

SEQ ID NO: 484259 - DNA, 122 bp, Homo sapiens
cggggcatgctatttcgtttatttaagcttatttctgtgaaactgagatgacaacacctacacctcattgggttcttgtgaaaattcagtgatacatagtagataaaaaactagtgtagtgc

SEQ ID NO: 484260 - DNA, 122 bp, Homo sapiens
tgtaaaatagggataataatggtacctatatcttagacttataaggcttgagtgaatttacagcagtaaagtccccacagcagtgtctggcacagaggaagccctcaaacattcactactgt

SEQ ID NO: 484261 - DNA, 122 bp, Homo sapiens
gtctcaaactcccaagctcaagcgatccacccacctcagcctcccaaagtgttgggattacaggcatgagccaccatgcctagcctgagcatcaaaaatgtgaaaatgtagggaattacggg

SEQ ID NO: 484262 - DNA, 122 bp, Homo sapiens
ctgacctcagatgatcacctgcctcagcctcccaaaggatcctctgctttagaaggtttacagccaacagttcctctgcttaattggacctcccaagtcagagatgcaggaccatttctttt

SEQ ID NO: 484263 - DNA, 122 bp, Homo sapiens
tttacacatttttaaaataattcaaatttaaaacaaagcctttggtaacaaaggtctttacagtctctgcagtgatctgtattcctcaataagagcacctacctgtgacaggcaggccctcc

SEQ ID NO: 484264 - DNA, 122 bp, Homo sapiens
actcaggacaatggcctgactcaagaaggatacatggtgcaacgtgcccatgtctggccacagcccaatagaaatgcctgggagaaggagccatggtggaacctggtggacctcaatggaaa

SEQ ID NO: 484265 - DNA, 122 bp, Homo sapiens
gtctcaaactcctgacctcaaatgatccacctgcctcaacctgccaaagtgctgggattacaggcatgagccatcaggcatggcctaatttactattttttggtagagatggggtttcaaca

SEQ ID NO: 484266 - DNA, 122 bp, Homo sapiens
aaaaaaaaagtgaacatttctcgggacagagatgacatgtttcattcatctgtataactccagtacttggcagagtatctcaaatataggcagtccataaacataatgacacaaaggacaaa

SEQ ID NO: 484267 - DNA, 122 bp, Homo sapiens
cagtgccccagaaatgactacggaggcacatgggggctaaagtgggtccccgtagaactacagtccagcctgggtaagccctgctagcaccagaggtgcccagaggaaaaactgaattgagg

SEQ ID NO: 484268 - DNA, 122 bp, Homo sapiens
ttttgcaaagaggatctcactgtgttgcccaggttggagtgcagtggctattcataagcacagtcccactctaaaacagtttgaacatctacctcttgggattgttacagaagataaagtag

SEQ ID NO: 484269 - DNA, 122 bp, Homo sapiens
gaatggaccaagggggactcctgaccccagggcaagcaatccatagtcaggacacaattacaggcttagtgacaacaatttaagcactgtgtgcccatcactgtgccaagcatttcagagtt

SEQ ID NO: 484270 - DNA, 122 bp, Homo sapiens
gaaacaagcatgattagattacagagcagactacaagattccacaccaagtttatagatacagcatcaaacttgcagaaagggtcctcccatgctagcttccaggaactgttttccaaggag

SEQ ID NO: 484271 - DNA, 122 bp, Homo sapiens
ttttccttttagctgctgatagattaatagtatgtgaaccttttaagacatttaagattacagcaaatcaaaaattcactgaaaagaaatgcttttgtgtgtaagtggtgcctataaagtag

SEQ ID NO: 484272 - DNA, 122 bp, Homo sapiens
gcctcaaacttatggcctcaagtgctccccctgcctcagcctcccaagtagctgggactacaggcatgcaccaccacactcagtggaattttcaacttgaattgaggcctggttatatttgt

SEQ ID NO: 484273 - DNA, 122 bp, Homo sapiens
tcaaatgtcaaatatccagtctgggttcagttttccccagttgtctcctaagtacttttacagtttatttgttaaaatctggatccaaataaagtctatacactgtagttggtcaataggtc

SEQ ID NO: 484274 - DNA, 122 bp, Homo sapiens
agcttcctcccatgcctctgagggtgggacaagcgggggagacccagggagagacagttacagggactcacatataccccagtttacacaagaggaaacagattgaaacaggtgcaggccac

SEQ ID NO: 484275 - DNA, 122 bp, Homo sapiens
catgggcactactggcctcccactggccacagacctttttagccaatcgccctttaaatacagttgttcagaggattaggtgcatgtgccttatatgacacaaaataatagcacctgagatc

SEQ ID NO: 484276 - DNA, 122 bp, Homo sapiens
ggctttccaaaggtgtgtgatgtgcctagcactgatagaaaaaggggtcccgggtccctacagtcacctttcatgaaaagggtatgaaggtacagagaatctaccttcatcacatattgagc

SEQ ID NO: 484277 - DNA, 122 bp, Homo sapiens
aagcccttctttcttggcattaggctcatatactcatgttataggccagttctgacattacaggcatgaaacattctagtagatacaagtgagcatttctatcccagcaccctgatgggcag

SEQ ID NO: 484278 - DNA, 122 bp, Homo sapiens
agatgaagaactggggtgtgtgggcattcatagcttcacttggatgctggtacccaggcacagcagctgtgtgagaacatgataatcaaagcttccctgcccatcagggcctcaccaggccc

SEQ ID NO: 484279 - DNA, 122 bp, Homo sapiens
taaccttttagtgtccagtttctcatgtgttaaatataaaatgatgtactgggttcattacagtccagggccacagcacttcctcagcatgaactgcctgggcagttcatttccccatattc

SEQ ID NO: 484280 - DNA, 122 bp, Homo sapiens
aaggtcatggcccattggtccatcctgaggaccacaggtaggacacaaagcctgaggatacagtaaccttagagctctctggcctggctagacctgatggcaaaggacaggaccccaggccc

SEQ ID NO: 484281 - DNA, 122 bp, Homo sapiens
attagaacacagccacaatcattcatttacggattgtctatgactgctttctcactacaacagcagagttgaagagctgcaacaaaggccatataccctacaaagcattttttttttttttt

SEQ ID NO: 484282 - DNA, 122 bp, Homo sapiens
tggtgtcccaaaatgttggcattgcaggcatgagtcactgtccccagctgatagtatttacagccatgaacttatatgagatcatcaaggggactagagaagagttgtgggtatagaaccct

SEQ ID NO: 484283 - DNA, 122 bp, Homo sapiens
gagaaaacccacatagacaagagcaccatatgtgttagagtatagtacactcataaactacagccattgacaatcattttcaaagaaccctaaagaatgagggaaagggttcaaaatacaac

SEQ ID NO: 484284 - DNA, 122 bp, Homo sapiens
gtctcaaactcctgacctcaactgatcctcctgcctcagtgtcccaaagtggtcggattacaggcataagccactaggcccagcctctctacaaaaagttttttaaaaattagctggagtgg

SEQ ID NO: 484285 - DNA, 122 bp, Homo sapiens
acacaaatcggtagcttccctctggccctcaatttgcccaagtatgaaataaagggtctacagtcataccaccctgaatgcacctgatcttgtctgatctcagaagctaagcaaggtcgggt

SEQ ID NO: 484286 - DNA, 122 bp, Homo sapiens
ctactggcatctagtgagtaaaggccaaggatgctgctaaatatcccacaatgcacaaaacagccccccacagcaaagaatgatctggcccaagatatcaatagtgctgagggtgagaaacc

SEQ ID NO: 484287 - DNA, 122 bp, Homo sapiens
gagaaaagtcagtgctttgaggctccacaacaccttgctgtgtccatttagagcaatttacagctgttgctgtaattaatgaagctatctcctcccaggcaaagcctttggttgtgttggag

SEQ ID NO: 484288 - DNA, 122 bp, Homo sapiens
ccacaacaaaaatgaagataattacagtgtacacgttaagagagtaatcatatcggtctacagtcaccaattctgcaaattgttctggggcttggtcccaggccccagagtcctctgaggtg

SEQ ID NO: 484289 - DNA, 122 bp, Homo sapiens
agtgtcagtggacaaacataagagtcagtcaagtggacaagacaccctagtttgtgattacacctctctggaaaagtagcaggagcctagcttttgtaagaaataccattcacaaagcagat

SEQ ID NO: 484290 - DNA, 122 bp, Homo sapiens
tatttgattagtttcttgattgctaacatggtttgcttttttgtttgtttgttttatttacagcacaaaaaggttcaaccaatgcagcaccacaggagaggcatgagagcatgccagatgta

SEQ ID NO: 484291 - DNA, 122 bp, Homo sapiens
ccacagccacaaaggtagagggaatcccagcctggatccaccacagccatataaaacctacagcacctgagacctgggaggtaagaccaagccaggacaacccctgcaaagtgatgctgaag

SEQ ID NO: 484292 - DNA, 122 bp, Homo sapiens
gggtgctcaaacctgtgcctggggcctcataagcacagttcaaggaggttgtccttgtcacagccattactgtcacagggtaagggactgagccacagtcatggtctaaagggattgtcctg

SEQ ID NO: 484293 - DNA, 122 bp, Homo sapiens
gaaatagtgacaatattggtggtgcttgtgctgggagtttagaggctcattcctacactacagccctgagaggttctgaaaccatgtggattccatgaggcaatctttagaaatgatgagga

SEQ ID NO: 484294 - DNA, 122 bp, Homo sapiens
actttctctaaagggcaatagtaaataatctgggtgttttgggccacaccatctctgttacagctattcagctctgccactgtggtataaaaacacaggcaacacaaaagtaatgggcgtgc

SEQ ID NO: 484295 - DNA, 122 bp, Homo sapiens
caagaagggaatggaagcaatgaaaccaccttcacatgtttgtaggaggccatgtcactacagctgttgttaatccactcccagggaagggcaatgcaggtttgctgtttaacaccgaaatt

SEQ ID NO: 484296 - DNA, 122 bp, Homo sapiens
atcttgaactcctgggctcaagtgatcctcctgcttctgccttgcaaaatgttgagattacaggcatgagccaccatgcccagactatattaactccttaaaggtgggctatggaaataatg

SEQ ID NO: 484297 - DNA, 122 bp, Homo sapiens
ctcaacccttcctgtttcgctttccttccctggccttaatttctggatgtttggaaactacaggactctgtttggaaacaagatcaagtctgtggctaagagagcattctcggggctggaag

SEQ ID NO: 484298 - DNA, 122 bp, Homo sapiens
ggtgatggtaggggtgagaacacgccaggctcactgagttaactctggcctctaggtttacaggtgagaagtcaattatgactaatcaccctgcttgatttttcaggccagctcaatccagc

SEQ ID NO: 484299 - DNA, 122 bp, Homo sapiens
attaacagagataactgtcataattcaagcagttgcactctatagagcaaccagagactacaggcatcaggattatgcatgttcagtaaaattatatgcaaatgttggggaattatgagata

SEQ ID NO: 484300 - DNA, 122 bp, Homo sapiens
aacagacacaaagaccaatgaaacagaatagagaaccccaaaaataaacacatgcacctacagccatcagctttcccagggtaacacagagagccaagtggcacctgcacattacactgtgg

SEQ ID NO: 484301 - DNA, 122 bp, Homo sapiens
atgtgggggctgttgggatggagtggatgtattttgcatatgagaaggacatgagttttacagcaccagggatagaatgctagggtctgaatgttcccaccaaaactcatgttaaaatttaa

SEQ ID NO: 484302 - DNA, 122 bp, Homo sapiens
gaattagtataaatacctcaggtggggttcagtaagaaaatagtagagtgattaagagtacaagcagtggagttacaatgcctgggtgcaaatcctggctctgcaagtgctagcttcattaa

SEQ ID NO: 484303 - DNA, 122 bp, Homo sapiens
gacatgaatatattcagcagaatgcagggaggtgtaggacaaaggcctggagaacgtgtacagtcctaagatgggagagtttacaagagatggatcctgctagtcagagttatcaggaaata

SEQ ID NO: 484304 - DNA, 122 bp, Homo sapiens
gtacaagaatcatggcaccagcatcagcatctggttagggcctcaggctgcttccacttacagcagtagacaaagggaatttggcatgtgcagatatcatgtggaccaagaggtggcaagag

SEQ ID NO: 484305 - DNA, 122 bp, Homo sapiens
ctgcagccatgtttccccccaacctcttccagccaatgtcttagcatggcagtggtactacagccagacaatttgtgctcaataccagacaactctattggttaatatttgctggaggattc

SEQ ID NO: 484306 - DNA, 122 bp, Homo sapiens
tgcagatggagaaggcccagagacattaagctcagcactctctaaaggagcaacagtttacagcccttccagatacagctaccaggtgagatgagaaattgctggtctctagccataggagt

SEQ ID NO: 484307 - DNA, 122 bp, Homo sapiens
acacgggcccatgccaactttcaggataccattccttcccaatcaatatcctcactttaacagttcatacttaacaaggctgggagttcaacttgcattgtaattcagcaagtcacagaatg

SEQ ID NO: 484308 - DNA, 122 bp, Homo sapiens
tatgtgactgagaaataaactttgatcttcttaatcaattttatttatttatctgtgttacaggagctaagttgagctctaatataaactaatctcctaagttagaaaaagattacatctat

SEQ ID NO: 484309 - DNA, 122 bp, Homo sapiens
ggtatcagcatggccacagtaggggtagaacaacaagcagacagttggggtccctgagtacaggcctaggcttttggacagcatttgtggacctgcctgccctgggccagagtggagcctgc

SEQ ID NO: 484310 - DNA, 122 bp, Homo sapiens
gctcagtttcttcaacctgtgctttttatcttttagtgaatcttgtaattttttttcttacagctagacatcatatacttgatgaaaggacctggggtaaataggcctttggtaatgtggta

SEQ ID NO: 484311 - DNA, 122 bp, Homo sapiens
tttgcttggaatattgctgatccttctttttcagagtcaatgaaacttttgaactatttacagcctttaataattaagtaaggtatacactcctgtaatcaagatttggagcatgtttgttt

SEQ ID NO: 484312 - DNA, 122 bp, Homo sapiens
tggcccatttaacagagaggtgattggtccattttgacagggtgctgattggtgcatttacaaaccttgagctagacacagtgctgattggtgcatttacagtcctttagctagacataaaa

SEQ ID NO: 484313 - DNA, 122 bp, Homo sapiens
gtaacgtttattgggaagtctgcctataagtggacctgtgcagttcaaaccctgattttacaggctactaggtggaagggacttgccttgtctcagattaaccttgtttttggacttggact

SEQ ID NO: 484314 - DNA, 122 bp, Homo sapiens
tccattgtttaaatcacctagtctataatactgtgttataacagtcctagcaaataattacagttactattacaaacctatcagaatggctaaaattaaggagtgcagtctggtgtggagtt

SEQ ID NO: 484315 - DNA, 122 bp, Homo sapiens
cccagtcttgtttctaataggcaagtaaacattttcttcattatatacaatctataacaacagtgcctttgcccagctcaaagataaagtgatttgagcaagacaaaatgttggacattaag

SEQ ID NO: 484316 - DNA, 122 bp, Homo sapiens
tcgagggccttaggtgagactctgaaacttgatggcttcaggtgagactcagcacatttacagctgtggtggctataaggcaaggctactgcttgagaaaagtgggataaaagaaaagtggg

SEQ ID NO: 484317 - DNA, 122 bp, Homo sapiens
tgtggtgtgtgtgtgcgtatgtaagtatgtgtactggtatacattatgtgtgtatatttacagcacacaactggtagaaacagatgacattttgatatttgtttaataggaatcaaaatcat

SEQ ID NO: 484318 - DNA, 122 bp, Homo sapiens
tgaacccataaaatggctttgttattcctgaaaatgtttaaaaacattgttccctttctacaatagtcaaactttcactcatggcccatgaaagcatccttagaaatgtgaggagtttgtct

SEQ ID NO: 484319 - DNA, 122 bp, Homo sapiens
tgagcctttaagccctgaatatcagaaaaatttcttctattaaatatacctttatatttacaggtagtgcattggaaaggtcatggttcaatggtatattagaacacaagaatagacaacct

SEQ ID NO: 484320 - DNA, 122 bp, Homo sapiens
agaacagtgagaaatgaatttctgtggtttgtaaattacctagtttaaggtattttgttacagcagcacaagtggatgaagagatagtggcacagggtctcatactgagatgggcctcttgt

SEQ ID NO: 484321 - DNA, 122 bp, Homo sapiens
ttttccaatttagatgccttttatttctttttcttgcctaattactctggctaggacttacagtactatgttgaatagatggcaagagtgggcattcttgcctaattgttcataatcttaga

SEQ ID NO: 484322 - DNA, 122 bp, Homo sapiens
gtcttgaactcctgacctcaagggatcctcccgcctcagcctcccaacgtgctgggattacaggcatgagccactgcaccaggccctgatttaagaatttaatctgctaatttcaaagtaca

SEQ ID NO: 484323 - DNA, 122 bp, Homo sapiens
tctcgaattcctgggctcaagcaatcctcctggccttggcattccaaagtgctaagattacaggcatgagccacagcatctggctttgcccactttttaatggggttgtctttttcttcttg

SEQ ID NO: 484324 - DNA, 122 bp, Homo sapiens
atttttagtggcatgcaggctatacctcagtatttgtggacatgcacccaggaatatgtacagtcacaagattactcatcaggaccaatgagaccctttgcacagcatccttggaggggatt

SEQ ID NO: 484325 - DNA, 122 bp, Homo sapiens
tggttacacccggatgccgtcttgtggcacgcactgcatattgatatacactccattttacagcttcatttaaccaatgtgttgagtcctgaagggctttaagatataccaaaggaggccca

SEQ ID NO: 484326 - DNA, 122 bp, Homo sapiens
tagacatctactgagtcctgcagggactgtgttgtactaatcctgtatatattgcaactacagcagaacaggagaggagcacctggccagggcaccccaatatgaggaaactcctggggtca

SEQ ID NO: 484327 - DNA, 122 bp, Homo sapiens
tgtcacaaggttgtaaagataaaatgatcacaaccccttgattttcctgcctgccatgcacagcaccatttgctcacattaatagaattcagaaaatgtcctcagggagtgatggatccaga

SEQ ID NO: 484328 - DNA, 122 bp, Homo sapiens
ccaggcagagttttttgttgtttttttttaaagacacttacacctttacgcctgcagttacagcacctggctttaagtagaagttttacttccaatttaaatgttgatttccctatgttatc

SEQ ID NO: 484329 - DNA, 122 bp, Homo sapiens
agcacctaaatattctatgaatagcacctctggcctccatctcctaaagtgctgagattacaggctaatgcctggaggtggaggccaaaggatcacttgagcccaggagttcatgaccagcc

SEQ ID NO: 484330 - DNA, 122 bp, Homo sapiens
tgacattaaaatggaaaaggtttatgtaaatcatgtgaaaagttaaccaagcacggacaacaggtagttttgtcagctccatcttggggcaaaaactggagaaaagattgaaagaaatttct

SEQ ID NO: 484331 - DNA, 122 bp, Homo sapiens
gttcccctgtctgcacctccagctgaaactctgacggaaggaggaactgtttctcagttacaccacttgtatatatgttcattatgttctaagagctaggctcagctttaaatgggtcttta

SEQ ID NO: 484332 - DNA, 122 bp, Homo sapiens
gcttgaggccaggagttcgtgactagcctgggtaacacagtgagagagaccccatctctacaaaacaacaacaacaaattagccaagtgtggtgatgcacctgtagttctagctactaggga

SEQ ID NO: 484333 - DNA, 122 bp, Homo sapiens
ttacccaatgcaccctgacaactcactgtttgggcacttccagcactcagaatgggtcttcaggcagaagagccccagaggcaagaagtctcaagccaggaggcccaaagtcactaccaaca

SEQ ID NO: 484334 - DNA, 122 bp, Homo sapiens
tctaaaatgaaattagtaattgccccttacagaattgctacaggaatacactagatactacagtgcctagctcagtgttgagcacaaaatggggcctgaaatgttacttcccttctccccag

SEQ ID NO: 484335 - DNA, 122 bp, Homo sapiens
cgttcagccatatatgtggccacggtagaaacattggctcagttacgttccttgaatatacagtcactgcagctggaaggatatggtataggtgctgggtactgcaaaagacaggtaatgca

SEQ ID NO: 484336 - DNA, 122 bp, Homo sapiens
actcatttaatgcccactatacgtctaaaacagtaactttttcaaaaagttgcaattttacagtacaagaagttaaacaacccactaaaagtcactgagccagtggtgctgggatttgagcc

SEQ ID NO: 484337 - DNA, 122 bp, Homo sapiens
agtaccattcttacccctattacaggaaattcaaggatcagagctcaagaaactagtttacaggcacatagataataggtttgatcttgagcaaagaccttgacttcttggtgtccatgtcc

SEQ ID NO: 484338 - DNA, 122 bp, Homo sapiens
gtttattgcaggacatttctatcttaatttttgctatgactttctacagatgtttggttacaatagcagatagtagtatattgtattattagccatagaaaggctacataaagacttacagt

SEQ ID NO: 484339 - DNA, 122 bp, Homo sapiens
gcagccgtatacaatactaaatgaaggagcgtggctgtgttccattaacacttttatctacagcacaggtagccagcccataatttgccaactcctggtctaagacaaattccacaggagga

SEQ ID NO: 484340 - DNA, 122 bp, Homo sapiens
tgcccttacaaaagaggcctgagagatctcctttggcccctctgccacatgaagttacaacaatcacctccaactcagaaaagagaggcacatgggaagccactgaatggagtctcttgctt

SEQ ID NO: 484341 - DNA, 122 bp, Homo sapiens
gaactgtgagataatacttttctcttttaaagccactaagtttgtggtaatttgttacaacagccacaatgaaactaatatagaactagaggagaaagaactgacttagaagacccactgcc

SEQ ID NO: 484342 - DNA, 122 bp, Homo sapiens
tgtgccaggccctggactggactgtggagtcacagatggaaggacagagtccccaccttacagcaccttatgaggagccacatgaggaggcccatcaacaaaaataatttcaatatgttctg

SEQ ID NO: 484343 - DNA, 122 bp, Homo sapiens
ctcaggctcacaggaggaggccacaggtcctgagttgcctgtggtgaacccagtgctctacagctgttgtgctcactaatcttacccagaaccctgtgaagcagagaggattacacccattt

SEQ ID NO: 484344 - DNA, 122 bp, Homo sapiens
caggacagtgtggcagtgacaccacaggagtcagacaacaatcagaacatggtaatgctacagcactatgacctcatgcctttgaataggagcattagacagagttaggataagatatacag

SEQ ID NO: 484345 - DNA, 122 bp, Homo sapiens
acaacccctgttggagggtctcacccaagttgggtagcatggggaacaagacccatttaacaagactttgttacttggtggaggggctgtgcctcactgtggggaaacccacttttcagggc

SEQ ID NO: 484346 - DNA, 122 bp, Homo sapiens
gtcttgaactcctgggctcaagtgatcctcctgccttggcatcccaaagtgctgggattacaggcatgagccactgtgtctgaccaagatatactgttatgtagcattgtttattaaatatg

SEQ ID NO: 484347 - DNA, 122 bp, Homo sapiens
gttggtgaaagaatatcagagattttgaatgcctcattaaggtgtttaaattttattttacaggcagtgaggaactggggattgttcttatgcagaagtaaattgatgaaatctatttttag

SEQ ID NO: 484348 - DNA, 122 bp, Homo sapiens
gtctcaaactcctcagctcaaacaatctgcccacctcgtcctcccaagatgctgggattacagtcatgagccactgcagccagcctacatttttaaatggttggaaaatcaaaagattattt

SEQ ID NO: 484349 - DNA, 122 bp, Homo sapiens
ctaaggaatccaggccttctcaatagtctttatcttgcttagattgtagaaccatcattacaggcaattgaaggttagctttctcattgtcattattttcttgtggcttttcatactactct

SEQ ID NO: 484350 - DNA, 122 bp, Homo sapiens
cttaactattgagaagaaattttaaatgatttatgtaaaaatagcaaccatacagaattacagtcatattggttgaaatatactatgtgagtgatcattttactataacttatggccaagag

SEQ ID NO: 484351 - DNA, 122 bp, Homo sapiens
gcactgattggtgcatttacaaaccttgacctagacacatagtgctgattggtgcatttacaatcctttagctagacataaaagtgctacaagtccccacccaactcaggagcccagctggc

SEQ ID NO: 484352 - DNA, 122 bp, Homo sapiens
tgttataaaggagtacctgagaatgggtaatttataaagaaaagaggtttatttggctcacagttctgcaggctgtacaagaaggatagtgccagtatttgcttcttgtgaagcctcaggct

SEQ ID NO: 484353 - DNA, 122 bp, Homo sapiens
aaatgatggaaaattccaaggtagaaaaaaggaaggtgttccagtgatgctgggtggctacaagcaggacaactggacaactgtcctctttaaactcagttgggtactgttcccaatatcat

SEQ ID NO: 484354 - DNA, 122 bp, Homo sapiens
tttaacatatgcattcatctatttaatattcactgagtactcacaatgtaccaggcattacagtcagtgaaaaaaagcaggatacagaatcattttattctatgagtacaagttgtaaacaa

SEQ ID NO: 484355 - DNA, 122 bp, Homo sapiens
ttcatggtggcatgcttgttctttgtcccagagtactgtgtaaaaggcatctctgatgtacagtaacatgaacctgcccttttgtttccaacagatggcaggaaatccagaccagcaggagg

SEQ ID NO: 484356 - DNA, 122 bp, Homo sapiens
gtgtcaaactcctgggcacatgcaatcctccttctttggcctcccaaagtgctgggattacaggtgtgagctactgtgcctggccaatgaagctgctttaaaaaaagagctgggagtggccg

SEQ ID NO: 484357 - DNA, 122 bp, Homo sapiens
aaattataaagcatgcaaccacactaaacaaacaatggcatttttttttttttgcccatacagcatgtttgtcagaatactgacacatggaaatttcaagcttttttagttcacaggcattt

SEQ ID NO: 484358 - DNA, 122 bp, Homo sapiens
tctcaaaactcctaagcccaagtgatcctcccgctttgctctcccaaagtgttaggattacaggcatgagccaccatgcccagcagatgtcttgagatctgttaatgtagttagagaactag

SEQ ID NO: 484359 - DNA, 122 bp, Homo sapiens
gtcccgaactcctggcctcaagcagttctcccaaatcagcctctctaagtgttaggattacaggcatgagccaccatgcccagccaaaactttgaaacataaataaaagtaaacaataatat

SEQ ID NO: 484360 - DNA, 122 bp, Homo sapiens
cctgagacttaatctttcctgagaaaggatctatccaatggtttagtcaaactgactttacaggatgttctgtaattggtggacacattgctagttccttctgtattaatcatgttatttaa

SEQ ID NO: 484361 - DNA, 122 bp, Homo sapiens
gtgacacgttttctaggggccagtgacacgttttctagtgtttttccacattcccgtctacagtacatatggaatatgaacagttttttccaagaaaagtgattgtttcttctcaggctttc

SEQ ID NO: 484362 - DNA, 122 bp, Homo sapiens
tggaggtcattatcttaagtgaaataagccaggcacagaaagacagataccacatgttctcactcaaatgtgggaactaaaacatttgatcacttggaggtaaagagtgaaaaactagacaa

SEQ ID NO: 484363 - DNA, 122 bp, Homo sapiens
tttacaatgggtttatccaggcattaaatgcttttcaatttacagtatttttttgacttacaatcagtttgtctggatgtaaccatgttattagtcaaggagcatctgcacatgtttagtgt

SEQ ID NO: 484364 - DNA, 122 bp, Homo sapiens
tggggcctttcctgaccctgggacactagctggaatcacatgcctcctcctgcttcattacagcagttatttacagtgggttatagtgaggggatgttaagagatagttacagttaggatga

SEQ ID NO: 484365 - DNA, 122 bp, Homo sapiens
gactaagcagaacccccacccctgtctctctgcaatgagatatacataaagtcaggtttacagcttgagacaggatgaaatgcagatgcatcccccagggctttccaggatgactgcagact

SEQ ID NO: 484366 - DNA, 122 bp, Homo sapiens
gtctcaaactcctgggcttaagcaatcctcctgcctcagcctcccaaactgctgggattacaggcctgagccactgtgcccagccacaatagacattttttaaaaaatcacagtttctatgg

SEQ ID NO: 484367 - DNA, 122 bp, Homo sapiens
actgtgcctaggccttaataaggtgaatgtgaatcagctgtttcctcaaacatggatttacaatctcacacaagccacagtgccaattggcacattgagtagtacagaacctggtgtcatct

SEQ ID NO: 484368 - DNA, 122 bp, Homo sapiens
cttgcatcaaagaaaggtcaaggtcactgtttggtgatctgctgccagtctgatccactacagctttctgaatcctggcaaaaccattatagttgagaagtctcttcagcaaatcaatgaga

SEQ ID NO: 484369 - DNA, 122 bp, Homo sapiens
agatcaatgagaagccctgatttgcccaaaagtggccccaagtgacacagtgtcactttacagcaccagttgattaaatgttggcattgctaactcacatggtgattttccccaaaagctat

SEQ ID NO: 484370 - DNA, 122 bp, Homo sapiens
aattgaggtttgggagcctctgcctagatttcagaggatgtatggaaactcctggatgtccaggcagaggtgtgctgcagatgcacagccctcatggagaacctctgatgggggagtggaga

SEQ ID NO: 484371 - DNA, 122 bp, Homo sapiens
tgcagctcttaggctaccacagccatgggaaaagacctaattagagagatttctgttttacagcaacaactatacaggcccccacaacagcctccttgctgacacttgctgtttctgccaga

SEQ ID NO: 484372 - DNA, 122 bp, Homo sapiens
actccttgaataatgagaaagctgctatctggaaaggtcaaggaactggcccaagatctacagctattgagtgacaaagctgcaaattgaacccagatctttttgaccccaaagctaatgtt

SEQ ID NO: 484373 - DNA, 122 bp, Homo sapiens
agcagacgacaaaggcactcaagggactcttcatcatggttcttaagcagtttgaccacacagtcatgcattattgcctctgttaacatcttcagtttgaacaactctccaataaacttgat

SEQ ID NO: 484374 - DNA, 122 bp, Homo sapiens
ccaatgaagttggcaggccagagccagggccagtgccaggaccatgtagcggcctgactacagtcactaacttatgagtaggggaagaaaaaacattaaggaaatggctatgataagggctc

SEQ ID NO: 484375 - DNA, 122 bp, Homo sapiens
gtcttgaactcctggcatcaagtgatcctcccacctcagcctcccaaagtgttgggattacaggcatgagccaccatgtagcctgaagtttttcttagatccttatttccacaaatattttg

SEQ ID NO: 484376 - DNA, 122 bp, Homo sapiens
tttgtgggcaggtcaggttaagaatttcaggactgatgttgctggtaagaaaacatattacagctgatttggagatggcacatgaggcaaagcccaggggcagccctgatggattgggttca

SEQ ID NO: 484377 - DNA, 122 bp, Homo sapiens
aatctgaaccatctgaaatgtgctgctatgtttgttgcttttacactctttttcattttacaggaacacagccaactgctgctcttgtagtgtacattactgtgtcatatttatctgtttat

SEQ ID NO: 484378 - DNA, 122 bp, Homo sapiens
gtctcgagctcctgggctcaagcaatcctcccacctcagcctcccaaagtgttgggattacaggtgtgagccaccacacccagcaaatagaacttttgataaaaattgagagaggctctttc

SEQ ID NO: 484379 - DNA, 122 bp, Homo sapiens
caattagccgcccaattcagaaataactgtctaaaagaaaaaaagaaatccttcactttacagcagtgtgtgtccagagttccatgtcagcaggagccaatggatttaatttgcacatttta

SEQ ID NO: 484380 - DNA, 122 bp, Homo sapiens
atttactttttaacacataaagaaaagaggtttaattggctgatggttctgcaggctgtacaggaagcatagctctggcatgagcttctggagaggcctcaagaagcttacaatcatggcag

SEQ ID NO: 484381 - DNA, 122 bp, Homo sapiens
tctgttacaggggtctggggacttggggactcgggggcagtctgtgtccagcaagacctacagctagtgtgtgactgtgtttaacagacacaatgcagggtccctgtgtgtgaagggatgcc

SEQ ID NO: 484382 - DNA, 122 bp, Homo sapiens
gaaagtgtttgtgtggacccccatcctgggtctagcctggattccttctattccaagctacagctgctagcctcagaacccctatgaaaggaaaaattatgctgaaacaacagatagggaaa

SEQ ID NO: 484383 - DNA, 122 bp, Homo sapiens
aaaaaaaaaaaaaaaaaaaaaaaagaatgtggtattgtaaatccttgcacacttcagttacagacaaatatatatttataggctaaatatgcaaaagtggaattgcttggtctgagggtatc

SEQ ID NO: 484384 - DNA, 122 bp, Homo sapiens
agcctcgaactcctgggctgaagcgatcgtctcgcctcaacatcccaagtattaggattacaggcatgtgtgagcacatctagctaatttactcctggcctcaagtgatcctcctgctttgg

SEQ ID NO: 484385 - DNA, 122 bp, Homo sapiens
tggctgctttaagcatagtcctatgagagacaagaactctggctagatctggccagcctacaagcagaagtgaaaggacctagaattgtgctaatgcaggcattttctgtcttggtccgcaa

SEQ ID NO: 484386 - DNA, 122 bp, Homo sapiens
ctcttgaactcctgggctcaagcagtctggccactttggcctcccaaagtgctgggattacaggcatgagctaccacccttggtcataattgatgtattttattgttaatttttgttcgtaa

SEQ ID NO: 484387 - DNA, 122 bp, Homo sapiens
ataagggaatagaagcagactgcccaagtcagcagaacactttgctctggtacggttctgcagtgtggaagttttgtttttttgatctttgtaataaatcttgctggtgctagttctttggg

SEQ ID NO: 484388 - DNA, 122 bp, Homo sapiens
gagaggagaaaacagaggacctcatggtatggtgtggaactgcgaccaaaatgattattacaagcatttctcttgtaatgttctggagtatcacctagctgctaagggagaatcaaactcct

SEQ ID NO: 484389 - DNA, 122 bp, Homo sapiens
agccttggttggaattatggttgaagtgattctgaggtcctttaagatgactaagctgcacaggaccttaccatgtatctgttggcatgtatgacttggggtgaaaaatatcaggcccagat

SEQ ID NO: 484390 - DNA, 122 bp, Homo sapiens
atatccccaaatcaattaacaagcagttgacaaaaacacccatgatgactgatagttgaacaggccaacaccttcaagtcctgcccctcacatgtgggtacaagtgtgcaaagggacaagag

SEQ ID NO: 484391 - DNA, 122 bp, Homo sapiens
ctcaaacttctggcctcgaactcctggcctcaggcgatccattcgccttggctgggattacaggcatgagccactatgcccagcccttacagtgagaatatttaaagacaaatagaacaagt

SEQ ID NO: 484392 - DNA, 122 bp, Homo sapiens
attggaatacactgttggtaggaatgtaaaatggtatacctaaatggtaaatttggaaaacaggcaatgtcttaaaaagtaaagacatgcttttcagataacccagtaattctactcctagg

SEQ ID NO: 484393 - DNA, 122 bp, Homo sapiens
cagggaacaaggcatggtcttctgccatccggtagctggtgggacatgaacagcccattacagcacaaggagattaaatgctctgatgggtggggttggagagacttcctgtaggaagtgtc

SEQ ID NO: 484394 - DNA, 122 bp, Homo sapiens
aaaatgtgccacagtggggaaagcacgatgtttgatgtttaaaatgtttttgttatgttacagacttttaaggttatgccctcaactgtgcatagcagtgaagagacttgaaaaggaagaca

SEQ ID NO: 484395 - DNA, 122 bp, Homo sapiens
ctcaggcggagtggtgaggtagtggaggctgtggtgaggaaagaggaagtgacactcctacaggctggtaggacagcactcaagctgcctggctagaggagtcctagcaagactaccatagg

SEQ ID NO: 484396 - DNA, 122 bp, Homo sapiens
gtctcaaactcctaggctcatgctatcctcccacatccccctcccaaagtgctgggattacaggcatgagccactgtgcttgcccactaaattttttttaaggaagactattgaaagaaaaa

SEQ ID NO: 484397 - DNA, 122 bp, Homo sapiens
gcatgagaattgcctcaacctgggaggtggaggttgcagtgagctgagactgggccactacaccacagcctggatgacagagtgggatgctgtctcaaaaaatataagaaggccgggtgcgg

SEQ ID NO: 484398 - DNA, 122 bp, Homo sapiens
aactccagttggaagagacaatgccctcaccttatggcagaagaataattcctgaaattacagctatgaaggcagatgccagcaaaaagttgctgaagaagaagaaggtatgacatacctct

SEQ ID NO: 484399 - DNA, 122 bp, Homo sapiens
atactgtagtcttcagtagcttaatggtgggaagcttacatctggaagcttttggggctcctgcacctagccaggttcagtcattgtgattctgtaacttcaccagaactcaaatttcttgg

SEQ ID NO: 484400 - DNA, 122 bp, Homo sapiens
ttagtaagcatcatactggtgtgtattttgttttgctctgaatatcatccttttaaaatacagtaaataaaaatatgaaatatggttgagttgcagggaataatgtagtggttaagaatgtg

SEQ ID NO: 484401 - DNA, 122 bp, Homo sapiens
tctcagtagcaaagcattcaagatgttgcctggctgcttctaatagcctgtgatcagatacagggaacaaacacatgacttaaagttggaatatatagtttaaagggaagcaaaatattaaa

SEQ ID NO: 484402 - DNA, 122 bp, Homo sapiens
ttgcatgctctccagtcatttgttgaaagattcttaccaatgtaaataaatatctttctacagtcccttgggtctaattttccttaagaaaaaaatggtgttgatcttgatactttttttca

SEQ ID NO: 484403 - DNA, 122 bp, Homo sapiens
tgagccagctgagacaatggcaagccttggcctatgcatgcagctgggaagggcaggatacaggcttagctgagaaaagcccagcatgtcatactcttccaaaaggaaagctgtccatcctt

SEQ ID NO: 484404 - DNA, 122 bp, Homo sapiens
ccaagacattgatagggtcttccgtgcaaggataagatgactcttccttacactgccccacagcagttggtttgtaagaaaaaattccccaagattttaagtcctgggtatgcatggatacc

SEQ ID NO: 484405 - DNA, 122 bp, Homo sapiens
cgcttccagtcttggttacccacgtacttctgaaaaggcttcttgttgttttactgcagacagcacccacaatgttccagggaccccctgcatctttctgctaacaggctttctggaaaatt

SEQ ID NO: 484406 - DNA, 122 bp, Homo sapiens
tgctgtaaaagaatacccgaggctgggtaattaagaaataaaagaggtgtatttggtttacagctctgcagaccatacaggaagcatggcaccagcttctgcatcttgtgagggcctcaggc

SEQ ID NO: 484407 - DNA, 122 bp, Homo sapiens
caggagttgaccagcttgatatggcccaatggccaaatgtggctactacttgtttttgtacagcctgtgagctaagaatattgtttacatttttaagtggttgaaaaaaaggtcaaaacaag

SEQ ID NO: 484408 - DNA, 122 bp, Homo sapiens
tgtacattgcagttatctgtccagttctctgtatgggttaagggtgtgcacacacatacacagtactctctggtcacaactgtgaggtgcatgtagtaagccctagtagagagatgaaagag

SEQ ID NO: 484409 - DNA, 122 bp, Homo sapiens
ttccagctagtcccgccattataggctaaagtgtcctgggttataaataaacatgaaagacagtctaggtcacaaagactgcaattcctgggcaaagcctggtgcttggcttagctcagagc

SEQ ID NO: 484410 - DNA, 122 bp, Homo sapiens
atgttacgagacttacctaagcgataaactagtaaatactgagaagggagagtccagatacagcattacaactctgagagttctggcaagctagaaaatactagaaaagcactgaatattga

SEQ ID NO: 484411 - DNA, 122 bp, Homo sapiens
atgcccacattggacactcagaatttcagtgatgtcttccagaaatctttgctgaagctacagtctaacagattgtggtttacaagagatgccaggagcctctgggagaatggactgtaaac

SEQ ID NO: 484412 - DNA, 122 bp, Homo sapiens
ggggatcttgtattaaaatgcagattttgtttcagtcaggctggggttggattttagcatcagcatttttaataagctcccaggtgacatcaatgctgctggtctagagagcacattttgag

SEQ ID NO: 484413 - DNA, 122 bp, Homo sapiens
gagaaatgacaatgactggacgcagggatgtatcagtttaacttaggctgggctcccctacaccttgagatagtctagaaaaggagtcagaattgtcccacctaaggaatgaagaaactggt

SEQ ID NO: 484414 - DNA, 122 bp, Homo sapiens
tttggacttccaacaaagaaagaagggaagaggccaacgcacattctggaaacaggattacagctacttgggcagagaagtaaggattccaggaacccagactagggcctggaagcgggagt

SEQ ID NO: 484415 - DNA, 122 bp, Homo sapiens
tattactcctattttatggacggggaatttgggactcagagaagttaaataactttcctacactcacactgctggagaccagcagagctgggaagggcagcaaagccattctgaccccaaag

SEQ ID NO: 484416 - DNA, 122 bp, Homo sapiens
gtcaggctagtctcgaactcctggatacgcctgcctcggcctcccaaagtgctgggattacaggcatgagccaccatacccagtccttgaattggatttgaaaaactatctgttcttccagc

SEQ ID NO: 484417 - DNA, 122 bp, Homo sapiens
gaaaggtcagagactgtgttctgaatcttatggtagagacaggaggcattctattgcatacagtaacaggaagaagaatccaaatgcagcttttttgaccagctttacagagttcagccaaa

SEQ ID NO: 484418 - DNA, 122 bp, Homo sapiens
tctttgaaatacacttaacagcaaactgagttcaggcagggacagtagatagaagagttacaggcaggaatgtaggtttctgaaagatctaatctgagggacagtgtaagaatggcttcaga

SEQ ID NO: 484419 - DNA, 122 bp, Homo sapiens
ttaacagcaagggatgcatctgattaagactgctggcaagtgccaatgctaggcattcaacagtcagctgctgagaagaaagtaacatcttgatattgcaccatctgttgagaaacctgcca

SEQ ID NO: 484420 - DNA, 122 bp, Homo sapiens
caaaagcagaagttcaggcatggagccaagaacacgtgctggcgatgaaaaatcagactacagtttagctgcctcacagagctcaaggcaagagaccatccagctcttggtgtaggggtact

SEQ ID NO: 484421 - DNA, 122 bp, Homo sapiens
aaagttggtggctatacaatgggtgcagtagagatggatgtatttcagatccaggagatacagtagttaatctcttggtaatctcttgtccaattgtgagaacaaatggacaactgcgtcag

SEQ ID NO: 484422 - DNA, 122 bp, Homo sapiens
atgggaatcctcagaaaggaatagctgcatgctgtgcccaggaaggctgtgtgcttcctacagtagagtgctggtaaatgtttaacaaccagctctcagggtagaggagtgaggttgggaaa

SEQ ID NO: 484423 - DNA, 122 bp, Homo sapiens
actagagaaacagaactgattgaggcaacagataggatggttacagcttgacagccctcacagccctgtcatgataagatacaagaacacactggatgctagtaaagtacagtgaattgagg

SEQ ID NO: 484424 - DNA, 122 bp, Homo sapiens
gaggcaacagataggatggttacagcttgacagccctcacagccctgtcatgataagatacaagaacacactggatgctagtaaagtacagtgaattgagggacaggtgattgctgattaat

SEQ ID NO: 484425 - DNA, 122 bp, Homo sapiens
agtcaaactcttggcagatatataggattagaggaggagtccttgaataaaagatatttacagcaaacattcctggcagatgcagataggatatggggctaatgaagctgaagctttgggta

SEQ ID NO: 484426 - DNA, 122 bp, Homo sapiens
tcatgaaggggatggtagaaaggaggaaattgtccagatattaaggttgattagactctacaagaactaagaccaaagcccaagtttgagctacttgagtggagggcttaggggaacttgac

SEQ ID NO: 484427 - DNA, 122 bp, Homo sapiens
tttaattgtgggctatgaaatgaatatgaacatgaattcaatcatggaccatccattttacaggcatgtgacatcaggcaacttgctttatgtctctgtctccaaatgttcgtgttgttaag

SEQ ID NO: 484428 - DNA, 122 bp, Homo sapiens
tgtctcaaactcctgggctcaagtgattctcctgccttggcctcccaaagtgctgggttacaggcatgagccacttagcctggcctcctgctgatgccttttaatggaaagaaagggaaggt

SEQ ID NO: 484429 - DNA, 122 bp, Homo sapiens
cccacttctttctgagccagtgggctcacacaatgctatctctgagtcctttaaaacttacagccttttcaagccatcagaacccagagtccatctggttacatttgcttccatttagagaa

SEQ ID NO: 484430 - DNA, 122 bp, Homo sapiens
ctttctcagtaccctccactttcatctgttggtaaacgtcttaataagcatacaaatctacagcatctaccatgagagtggagtgtccttaactgaggcatctttgtgtggtacacagcctt

SEQ ID NO: 484431 - DNA, 122 bp, Homo sapiens
ggaaggcttatacaatgttatgtctggaaagcaaaaaaatttactgtaagtttggaactacaggatgaactacaaacaaggttgtaagagagaactgagtagtaaaaacatgtctaaagact

SEQ ID NO: 484432 - DNA, 122 bp, Homo sapiens
taaacagctaattatttttgtttttatgttatttttgtcatgagaatgaaaaaggaattacaggaatagatgttttgaaaagatgagatgggaagaaaaagtctgtagccagaactgaaatt

SEQ ID NO: 484433 - DNA, 122 bp, Homo sapiens
ggacaacatagcaagactgtgtctctattattaaaagaagaaaaagaaaaatgaatgatacagtccaaagaattaatgtttatcattagaaacccataagagaatgaatggaggaggagtga

SEQ ID NO: 484434 - DNA, 122 bp, Homo sapiens
acttcacctcctaggctcaagcgtttcttgtgcctcagcatccctggtagctaggacttacaggcatgagccactacacccagttataagggcattaatcctgttcttgaggggcctatcct

SEQ ID NO: 484435 - DNA, 122 bp, Homo sapiens
tctgtgagaaactaggcaacagggagcagaccagcacagctcggatttgatttgcagttacagccagtagctaaaaaaagggcagggttctgtagtcttgcttcttgaattttgtatttcta

SEQ ID NO: 484436 - DNA, 122 bp, Homo sapiens
gggatgagggatcatgaccagaatgagtgcattcgagaatgggaggagcagaagtaaatacagcaattgtaggtaactcaagaaatttgccatcaaaagtaagcaaaacaataaggcagtag

SEQ ID NO: 484437 - DNA, 122 bp, Homo sapiens
gatgggctcccaaggccttgggcagctccactcttgaggctctgcagggttcagcccgtacagctggtacagctggcattgagtgtctgcagcttttccaagtgcacagtgcaagttgtagg

SEQ ID NO: 484438 - DNA, 122 bp, Homo sapiens
ggaggtgggggtgtggaggactctataaactatgctaaggagtctgacagatcatagcaacagtcaaaaaggtcaaggatgaaaagtcaagaagggtcattatcaggtggaaaattctaaag

SEQ ID NO: 484439 - DNA, 122 bp, Homo sapiens
atcaagtgaaaatagagaccaaggcttggagaatgggcagaaaccaaagggatctggcaacagcaaccagaatcaaggtcatgcctacaagacaaagactggtcatgaccattgctactggt

SEQ ID NO: 484440 - DNA, 122 bp, Homo sapiens
ggttcttttttatgtatttttgaataatttatatagtgtctccaagttattgaccatttacaggctttgagctgagataggaatgcctgggcccagaattagatcatatctatttgaacact

SEQ ID NO: 484441 - DNA, 122 bp, Homo sapiens
agtatgaataccaggatatgtggttcatcaggggtagggggtaactgtggagactagctacaatacatgtgtcctttgacagtgtgatttcctggatcttcaactgtatacttaagtgtctc

SEQ ID NO: 484442 - DNA, 122 bp, Homo sapiens
aaattaccagggattgggggggtggagccaagatggctgaaaaggaacagctccagtctacagctcccagtgtgaatgatgcagaagacaaatgatttctgcatttccaactgaggtaccag

SEQ ID NO: 484443 - DNA, 122 bp, Homo sapiens
tcttaagcagtctctggccaggcagttgtccttggaagctccaagcttatatcaaccttacagctagcagctcccagctgaaagaaaagacctgactcctggcaaaagttccagagttgagc

SEQ ID NO: 484444 - DNA, 122 bp, Homo sapiens
cctccagaccccagactggtagatccatcaacagcttgcactgcacatctggaaaagctgcaggaactaaatgccagcctgtgaaagcagccaagggagctgtatcctgcagagccacaagg

SEQ ID NO: 484445 - DNA, 122 bp, Homo sapiens
caggtgtgagccaccgtgcccggactcaatgctttgttttaatcattacacccagtgctacagtaagtacttgtgtgcatatgtgtttccatattgtttggaggtgtttccttggagcactt

SEQ ID NO: 484446 - DNA, 122 bp, Homo sapiens
gagcttaggtgatctgcctgccttggcctcccaaagtcctgggattacaggcgtgagctacagcacctggggttatagccattcttgcaggagtgaggtggtatcctgttgtggttttgatt

SEQ ID NO: 484447 - DNA, 122 bp, Homo sapiens
tttctgagtttgtgagggagtttctggatgagattggcacttaaattggtggattaagtacagtagatggccctccccagtgtgggtaggtatcatccaatccatcctgagattggaaaaag

SEQ ID NO: 484448 - DNA, 122 bp, Homo sapiens
atgcagtgcggctgtagcccaggaatagtcagggaagcacataatttagttaaagtgtctcagcctaataagggaactgggcaggtagggataactaaaaaggagtgcttagaagagtattg

SEQ ID NO: 484449 - DNA, 122 bp, Homo sapiens
tgtgcaaggtgcaagccttggtggcttccacatgtgttgggtctgtgggtgcacagaagacaagagttgacctttgggaacctctgcctagatttcagaggatttatggaaatgcctggatg

SEQ ID NO: 484450 - DNA, 122 bp, Homo sapiens
aaaagatgtggtccatttgcattgaggaaggaggactaaaataagatctaaggaaatttacagtttgtgcattttactagtgatatggttaggtcacttgctacctctgggaaatcagtgat

SEQ ID NO: 484451 - DNA, 122 bp, Homo sapiens
tagctttgtctgtgggctctggagagctccctttgctgggcttggagcccgtggggactacagcagtctccagtgatgaagactgcaagtgtccacagtggctatgggggctgctggtatct

SEQ ID NO: 484452 - DNA, 122 bp, Homo sapiens
gttcctcctggtgggttcgttgttcaggagtgaagctgcagaccttcgagtttagtgttacagctcatgaaggcagtgtggacccaaagagagaccagcaggaaaatttattgtgaagagta

SEQ ID NO: 484453 - DNA, 122 bp, Homo sapiens
acagtgcttacctttttaaagaagtgaaggaaaataaataaattatttttaatgtatctacaggcaacaccaacattgcttagaagatttggatctcagcttatcaagtcaactgttttgtc

SEQ ID NO: 484454 - DNA, 122 bp, Homo sapiens
ggtggtgctactcaggaggctgtggtgagaggattgcttgagcccaggagtttgaggttacagtgacctatgatcatatcacagcaatccagcctgggtgaaacagcaagatcctgtctcaa

SEQ ID NO: 484455 - DNA, 122 bp, Homo sapiens
tccatatagacatagaccatgtacccaagtatgtggggattagtcaagaggctatgtttacaggagctggccttaagcctgaatccacagagatctgtgctgaggcattctttcagcctgag

SEQ ID NO: 484456 - DNA, 122 bp, Homo sapiens
gaattgctgaaatgcactgcttcagtattgtgcccctgttcttagtaataatttgatttacagctactgccataccagtacttataaagggagtctgattgggtttttgttttttggtttgt

SEQ ID NO: 484457 - DNA, 122 bp, Homo sapiens
aaaagaaagctcatcaagccagagctggagtatctcaggtaagtgtgccaactatgactacaggctcaataggaaacatgtttataggactagtagattcttttgtttgttgaatataaatt

SEQ ID NO: 484458 - DNA, 122 bp, Homo sapiens
agacattggtaggaggggttgttttcagattaagggatattatgaatgtttgtggtattacagctgtgatagttaattttaattttatgtgtcagtttgactagatcatggaatggctagat

SEQ ID NO: 484459 - DNA, 122 bp, Homo sapiens
gaaaagcagattacagcaggataaagagggaagggtaagtatactaacatagtaatgttacaggatagtacagagatattaagagatagtatgagggagcctaaggatcagtaaataaaaac

SEQ ID NO: 484460 - DNA, 122 bp, Homo sapiens
aggccaggagttcaagaccagcctggccaacatggtggaaccctgtctttactaaaaatgcaagaattagctgggcatggtggcacacaactgtagtcctggatatttgggaggctgaggca

SEQ ID NO: 484461 - DNA, 122 bp, Homo sapiens
gaaagttgtctcaagagacattcaagtttgcaattcattcttcatggttgctgctgtctacagcactcaaaagaatgtgagtgcaggtcaggtccctttggcctgcctttgacaccacccct

SEQ ID NO: 484462 - DNA, 122 bp, Homo sapiens
gaatgaagaactcagagaattccatgagatttttggatacaagaaaagattaagttgttacagtaagacctcatggagaatacaagactctagcatgatgttgggaaaatgagaatataaaa

SEQ ID NO: 484463 - DNA, 122 bp, Homo sapiens
aaatgagacatgcatggaaatttttaactggatcatttttagactctaaattcagagttacagccatgtatctgatactgatctgagagtgacattgtgagggtggtgtctgctggaaatac

SEQ ID NO: 484464 - DNA, 122 bp, Homo sapiens
ggtggaagttgcagaaaaattcatgctctttgggtgttaaattgcaacggcacaagcttacagccttagaatttaggttggtggccacagcaatgagatgcacattgcattgtgcattgttc

SEQ ID NO: 484465 - DNA, 122 bp, Homo sapiens
acatagcatctttactatataatgatcactgaaacacaagttttcaatcatgaacagttacagtggttcagcactaataaatgaaacctgttaggctagcccccaaataaattcacttctca

SEQ ID NO: 484466 - DNA, 122 bp, Homo sapiens
gactaggatgtttctgctaggaaatgagagtcgggtctaatcaagagatgcttttgattacagcatagagggatctgtacagagtgattagaatagctatagaccagactgctgtttgcctc

SEQ ID NO: 484467 - DNA, 122 bp, Homo sapiens
ggcagagcatctgggccctgggcccctgaggattgtctgatcttatgattggtttgcttacaatagcattttctcatttggctgatgggcaaattgttttcagatgaccttggagagccagg

SEQ ID NO: 484468 - DNA, 122 bp, Homo sapiens
agataaacattagctgttaagaagcagtgtgtgactaagagctggattcaaatcatgacacaccacttagaaactatgtgtcatatggcaagttactgaacttctctgtgcacctgttacag

SEQ ID NO: 484469 - DNA, 122 bp, Homo sapiens
cttaacattgaattgccagaataaatgaaggcacactggctgagagcctatatttgacaacagtatgtaaagtcaggatatctgtcatagttggagggatcatatcatgtattgtccaaact

SEQ ID NO: 484470 - DNA, 122 bp, Homo sapiens
gaaggtagaatctgcaggccttcagtggccaactcagagtctaagtggattccacagttacagcttgagcagctggttgtaggtcatgctttctacactgggcatataggatgtgtttttta

SEQ ID NO: 484471 - DNA, 122 bp, Homo sapiens
gaggggaaagtgggaagccaagtcaggttggtggaagagatgtctttaagctcctggccacagtcttagccatttggttgtggtgtagaactggaaattgtgtcaagggtgactgagctcag

SEQ ID NO: 484472 - DNA, 122 bp, Homo sapiens
aagtgagtttcatcatacttgaagaatggtgtagttattctctcgattggccagaaattacagtagaaactgctaccactgaaatgagaagctaaatgctgtggggacaataaaagtggcat

SEQ ID NO: 484473 - DNA, 122 bp, Homo sapiens
gtagggttgcttgcagtggtagcagccatatgcaggtggctggggagtacactttacttgcacttcagccctgacttttgcatccatagctgtagctgctgcaggtggggaaatctgatgtc

SEQ ID NO: 484474 - DNA, 122 bp, Homo sapiens
tataagcaaaagttaattgactcatagttccacatgactggagaggccttaggaagcttacagtcatggtgaaaggcaaaggggaagcaaggcatgtattacatagtggcaggagagaaaga

SEQ ID NO: 484475 - DNA, 122 bp, Homo sapiens
ttgggctgaagtgcaacttagacatgggctactgccataggagctgaggcgcaagcattacagcactgaggcctaagctgtgtgttaattctacatgttccaggctagagtgccactggtga

SEQ ID NO: 484476 - DNA, 122 bp, Homo sapiens
tgggcgcaagactccgtccccaccgccccccaaaaaaggcagtctggccatgatctgccacagccactgtgatgcactgttgggaattcctcctgggtgctaaccaactagtctccctagca

SEQ ID NO: 484477 - DNA, 122 bp, Homo sapiens
ttattgtaggatagtgaggagctgtgaagatagagggagtgatatattacaaatagcatacagtcacttactgtgtagtgacatacccatcaacaaagaatcttgtcccataagactgtagg

SEQ ID NO: 484478 - DNA, 122 bp, Homo sapiens
acaggtgggagccctgcccccttccaagttggcagggccctataaccccgggtacacctgcagtcaacaagctatggctatggacctaggcatccctgagcatttgggggctgggaagccca

SEQ ID NO: 484479 - DNA, 122 bp, Homo sapiens
ggctgaggtgggaggaccacctgagctcagggaggtcaaggctgcagtgagccatgattacaccactgcacccttgtctgggagacagagtgaaagcctgtgccataaaccagggaaagcct

SEQ ID NO: 484480 - DNA, 122 bp, Homo sapiens
ctgcttactacaaagccccagggcctagagaaaacctaggcagtagtcagggagtggttacagcaagccttgagtgagatccagtgctgtgctgacttcaggtctaacccaggacagtcata

SEQ ID NO: 484481 - DNA, 122 bp, Homo sapiens
ggactagattaaggttctaacagtggagataataaggatatttatggcatatttgagatacaatccagaacatttggaattgattgaatatggatgtagggaagaaagtaatgaccaagatt

SEQ ID NO: 484482 - DNA, 122 bp, Homo sapiens
gtgggcttgtgggctctctagcttcaggagtgaagctgcagatcttcgcagtgagtgttacagctcatgaaagcagtgtggagtcaaagagtgagcagtagcaagatttattgcaaagagcg

SEQ ID NO: 484483 - DNA, 122 bp, Homo sapiens
aagataataattcttccagtgtggccctggaaagccaaaagattggacacccctggtttacagtaaagcattctagagaacaggggtcagaaggaaaagtctagtgtgaccagtagtcctag

SEQ ID NO: 484484 - DNA, 122 bp, Homo sapiens
ctaatatatgttctacctttgaacatgtttcatatgctgattagaaaaatgtgtattctgcagcagttggatgaaatggtctgtaaatgttaggtctagttggtctagcatagtttaacttc

SEQ ID NO: 484485 - DNA, 122 bp, Homo sapiens
taaatactgcatctggctctacactttgcctgaaaggagagaaagaagggtttgaatctacagtccatgggaaagagctaatggtttggccagacagtcttggatgggaaagaaaaaagatt

SEQ ID NO: 484486 - DNA, 122 bp, Homo sapiens
tgagtaattgcagatagactagtgcctcttttttgttttgttttgtttttaaacattttacagccattatccaacagacagtaaagcagtggaccagttgctgtgtgggtataaagcaaacg

SEQ ID NO: 484487 - DNA, 122 bp, Homo sapiens
gctaggccctctgcttcagggtctctcataaaactacaatcaaggtgtcagccaggtctacagtcagctcatgttctgctggggcaggaaccacttccaagctcagttagtggttgttgagc

SEQ ID NO: 484488 - DNA, 122 bp, Homo sapiens
tcacccagccacttttctaatttatagacataaaagtaattgactcccacagcacagtaacaggcaatgctgcttggcatgccacaaacatctgaaagcttgtgacactcctaggattgtgt

SEQ ID NO: 484489 - DNA, 122 bp, Homo sapiens
ggtgggctgagccagggtccctctgctgtgtgcagtctagggacttggtgccctgcattacagctataactaaaaggagccaaggcacagcttgagctgctgcttcagagggtggaagctgc

SEQ ID NO: 484490 - DNA, 122 bp, Homo sapiens
aagtctactctgtgctctgtaaatggaacaacaaagtcagtatgatagtatatctgtgtacagcatggtttgctgaatattttaggcccactgttgagacctgctcaaaaaatttctttcaa

SEQ ID NO: 484491 - DNA, 122 bp, Homo sapiens
catgagctacagaatggatgttgtgttagcaggcatgaaaacagcatgaatctccttgtacatctccatcagagctcttgggtgactaggtgcattgtaaatgagcagtaatattttgaaag

SEQ ID NO: 484492 - DNA, 122 bp, Homo sapiens
ttcttgtttcttttgcccattcatttgttcaacaaatgttattgtgcacctactgtacaacaggctctggggacacagaagggaatacaacaggcagagttcctgctgtcttggtagggcat

SEQ ID NO: 484493 - DNA, 122 bp, Homo sapiens
ttttacatgtatttgtacgattacttccctgagactgtaacacgtttctggtcacctttacagtcccagtactcaggaaagtgcctgagacattgcaggcatggaataattattggttccat

SEQ ID NO: 484494 - DNA, 122 bp, Homo sapiens
cttttctattttagatatgtttagaaacacaaatacttactattgtgttacgattgcctacagtattcagtacactcacatgctgtacaggtttgtagcctatatttttatagccttggtgt

SEQ ID NO: 484495 - DNA, 122 bp, Homo sapiens
gtattcaatttcctgcccagagagaagcagagatccaggaggctagggagggttgggatacagctgacttgtcctccaaaggctcaagagcctaaatgaggctgttggctgtgtgtcttctt

SEQ ID NO: 484496 - DNA, 122 bp, Homo sapiens
agaggctgcaaccgtagaacaggaactctgggaagaaatagtcacagaacattgtgtctgcacctcctgtgtgctttttctatggctagaaggtggcaccaggtgactgggtccagcgctgt

SEQ ID NO: 484497 - DNA, 122 bp, Homo sapiens
gggcaggtcaggatggtggggtgatgtgagttgggagatgttagagggaaacaagaccaacagtcttccaacaagtaacagaagaatgtggcaaagtgaaaacaaaggaggcagctgcaatc

SEQ ID NO: 484498 - DNA, 122 bp, Homo sapiens
atatgtaatgataagaaattggttcacatgattatggaggctgagaagccacaaggtctacagtcagcaaagctgaagacccagaagagccaatgtgtagttccagtctgagtctgaaggtc

SEQ ID NO: 484499 - DNA, 122 bp, Homo sapiens
tgagaagtccagttgagctgagacttaagcagaagtgacagagataggtaagtgtaggaacagcactccaacagtgctccaaagaaaacacagcatgggccagcacagaaatttgagggata

SEQ ID NO: 484500 - DNA, 122 bp, Homo sapiens
ttgatttctttaccctatgtattgcaaaccacaatttgaaaaacactactttaagtcttacagtcaggaatgaattacaaggtcagaaaatatagcatgctggccaggcttatgcctgtaac

SEQ ID NO: 484501 - DNA, 122 bp, Homo sapiens
actggtgtggttttgctggaggcaggggttcagagctggatgtccagtgccagacaagtacagtcatgagagctgacacaaactgtcaacaaactctctgggaaagctatggctgctgttgg

SEQ ID NO: 484502 - DNA, 122 bp, Homo sapiens
catgaagttaggttcttgttagtgaggacacacaacaaagaaaataagtaaaacaaattacagtcatgtgctacacagcaatgttatagtcaatgatggaccacatataggacaatggttcc

SEQ ID NO: 484503 - DNA, 122 bp, Homo sapiens
taggatgtccttctttaatttagagatacgttgaggatgaaaatggagaaaaaaatattacagtaaaacaggttagataaaactgtttatctaaaactgtctgatgatatttgaagaggaca

SEQ ID NO: 484504 - DNA, 122 bp, Homo sapiens
acttcagatagatgtaaacaacagaactgcacataagcttgtttcctactgagatatctacagcccatatctcaagtaatctgataaaaaaaaggctgtgtctgtgggtgctgattaggtaa

SEQ ID NO: 484505 - DNA, 122 bp, Homo sapiens
tgtatttacccaatgtttgtaccctgatggtatctaggaactaacttgctttcaaatttacaggctcataggcagaagggatttgccatgtgtcagatggaattttggactgtggacttttg

SEQ ID NO: 484506 - DNA, 122 bp, Homo sapiens
cacaggatgacacacgtgaatgcaccaaagctggacctcaaattctgaaattcaactttacagcctctgcttctgtccatctgctaaggactcattgaaaagttggggggtataattatatc

SEQ ID NO: 484507 - DNA, 122 bp, Homo sapiens
aatacaaaaattagccaggggtgtgttccaagatggccgaataggaacagctccagtctacagctcccagggtgagtgacacagaagatgggtgatttgtgcatttccaactgaggtaccag

SEQ ID NO: 484508 - DNA, 122 bp, Homo sapiens
gaaacacctggcagttggggaggaaagcatcgtgccaagtattcttgccattttggctaacagtcttgttaccccatgagcaagagtaagaggcagaaggaagacaagcaattgcaagctct

SEQ ID NO: 484509 - DNA, 122 bp, Homo sapiens
attgaattacaagagcatggtaacacccctaagtaccctttagaggcctctgataggttacaccctacacaaatgaagaattcagcccaggaccaatcagaggcaggattctgcccagaacc

SEQ ID NO: 484510 - DNA, 122 bp, Homo sapiens
gtgtgtttcagtatgtgtgtttctaataagtgaggaagtggctgtcctgaattgctgtaacaagcacactatttatatgccctgaccaccataggatgctagtctttgtgaccgattgctaa

SEQ ID NO: 484511 - DNA, 122 bp, Homo sapiens
attgaaattcaaggactcactaggtgtctactaatgtagtagggataacattgagtgttacagcttggaagctgattacctttatgacatacagcttggaagctgattagctgtgtgacact

SEQ ID NO: 484512 - DNA, 122 bp, Homo sapiens
tccagaggtagaggaataattaaatgaaacaacaaatgatggtgaggtatctagggtttacaccagtggagtgattacaagctgttacaagattattaagaatctggcaagagtcacagttg

SEQ ID NO: 484513 - DNA, 122 bp, Homo sapiens
acaggaagtatttacatacagaaaaaaataactgacataagtaaacagcttgattgattacagccaggtgttagccatatttgggcatggtgtgatgaggcatttgccttatacgaatatag

SEQ ID NO: 484514 - DNA, 122 bp, Homo sapiens
ttgacatagtcaagcagaactgaaagaccaaagagatgattttcacagtggagaaaattacagtcattcagctatgagatagatgagtgtgacctgaaccagagatttgattctgatatgta

SEQ ID NO: 484515 - DNA, 122 bp, Homo sapiens
gggagttgttgagaggggaagggtgtttgcagggagaggagtcatggcattttgaggatacagtccaggtgtcagtgatacacattgctagaggattggtctatttggaaacatagatagaa

SEQ ID NO: 484516 - DNA, 122 bp, Homo sapiens
tgaacctgggccaccattgtaaaatggcacaggctaaaacaaagcactgctatgtggttacaggtcacacttccaaggacataaaacaagatggaggcctacagcaaagtttgctattgacc

SEQ ID NO: 484517 - DNA, 122 bp, Homo sapiens
acctcgtgatccaccctcctcggcctcccaaagtgctgggattataggtgtgagccactgcacctggccaaactttggttcatttttggtgcttaagacagcagagcttggttttctctgtg

SEQ ID NO: 484518 - DNA, 122 bp, Homo sapiens
gctgtcatctttattagagaagtgaggagttagaagtgaagattagaaatacaaaacttacagacagtcatgtaatagggttaaaaccagaaatgtcaactctgagccaaagtaagctaaag

SEQ ID NO: 484519 - DNA, 122 bp, Homo sapiens
ctccagcttgggcaacaacagcgagactccatctcaaaaaaaagaaaagaatttggctcacaattctggaggctaggaagtccaaggctgagcagcacatctagtgagggcctcatgccgtt

SEQ ID NO: 484520 - DNA, 122 bp, Homo sapiens
aaaaaaaaaaaaaaaaaaaaagtggggacagccagcaagaaacagggaacctctgtcctacagttagcaagtacagttagcaagaaaatgagaccagttctacaagtgcaagggactgaatt

SEQ ID NO: 484521 - DNA, 122 bp, Homo sapiens
gcagacagtacaaggagtgtgatgctaccatctgcttctgtggaggcctcaggaggcttacagtcatggtggaaggtgaaggaggagcagtcatttcacatggcaacagcagaagcaagagg

SEQ ID NO: 484522 - DNA, 122 bp, Homo sapiens
aagagacagtggtggtcatggaaaccaagaaggtggtttattctaagatagggtggtttacagcacatgtgctaaaaaggtcaaatgaagcaagatgtcaaaatatccattggattgaacac

SEQ ID NO: 484523 - DNA, 122 bp, Homo sapiens
aggctgttgcctcagagggcacaagcagtgaatggtgacatctccatggtgctaagtctacaagcacacagattgcaagagccatggaggcatggatacctctacctagatttcaaagaatg

SEQ ID NO: 484524 - DNA, 122 bp, Homo sapiens
aaagcaagtcatacagattttttggtttcccagtgcagtgcataaaaagttatgtttatacagtagtctattgtgtgtgtagtctaacaatgcacaacccttgatttaaaaatactctattg

SEQ ID NO: 484525 - DNA, 122 bp, Homo sapiens
cgggtttctcaggtgatgggcagggacatagagctcccaagagtttatgtcttttgtcttcagctaccagggcaggtagagaaaaaccatcagctgaagacagggctaggcatgtctaagct

SEQ ID NO: 484526 - DNA, 122 bp, Homo sapiens
aatgaaggtgccaggcaaataggtaaagggtttggccagcctgggggcctgagcattttacagcaactcccttcagagattgcatgcaaagctctggctgtgtcccaagcctggggttgggg

SEQ ID NO: 484527 - DNA, 122 bp, Homo sapiens
aaaccaaatgctgggttcccttcagccatttaaaaatgattagcacggctgctagccttacaagacttgggggatagacttgctatagagagcatggagaatcccccagcacccatgggtgg

SEQ ID NO: 484528 - DNA, 122 bp, Homo sapiens
agagtatattatttatttattaagaaataaagtatttcataatgatgtatcaccaatttacagtagggtgtcagtttaaactacatttatagattgttctgggggtcagtgaactatagctg

SEQ ID NO: 484529 - DNA, 122 bp, Homo sapiens
cactaagatccaaagaacaaaactgaaataatacatccctccattattgaaatttatttacagcagaggtcagtgtactttctctgtgaagggccagatagtaaatattttaggttttctga

SEQ ID NO: 484530 - DNA, 122 bp, Homo sapiens
ggtctcaaactcatgggctcaagcagtcttccagccccagcctctaaagtgttggaattacaggtgtgagccacaatgcctggccagtttttatttcatattagtgatggtgttctagtatt

SEQ ID NO: 484531 - DNA, 122 bp, Homo sapiens
aaaagcgtctgatacctaggaactctgagatacccaccctcgtttggactcagagactcacagtctcactgcatggtgtcaaggcaaagtgcaaaaggcacaggtctgttaaacccagacct

SEQ ID NO: 484532 - DNA, 122 bp, Homo sapiens
gatatgcctgggtatctgtatggcctgggagaatttggaagataagaccagggaaataaacaatcaccagaccaggaaaaggtttggatgcctttctaaggagtttgatcattttcctagat

SEQ ID NO: 484533 - DNA, 122 bp, Homo sapiens
tgggaatgttatgtgaacacaaaggcagagattgaggtgatgcgtcaacaagcccaggtacagcaaagattgtcagcaactcccacagaaatgaggtgagatgcatggagccatttctgtct

SEQ ID NO: 484534 - DNA, 122 bp, Homo sapiens
acaccacttagaaactatgtgtcatatggcaagttactgaacttctctgtgcacctgttacagtaggtagctaggcaggcatgaacagggtatgagagggccccacaacccccaaccaggaa

SEQ ID NO: 484535 - DNA, 122 bp, Homo sapiens
tattctgattttactaacaagaaaagcacagttagttacaggcctaaagtaacctggttacagctgttgtgccctgcactagctgattctaaagtttttactttgggtatatacttaatggc

SEQ ID NO: 484536 - DNA, 122 bp, Homo sapiens
acacacaaggatgattacttcttttggttaagaaatacatgattttactgatcatttttacagtctttgtggtattagaattctaaaaagtataaaacaaattatttatgattacttgttag

SEQ ID NO: 484537 - DNA, 122 bp, Homo sapiens
cagtcaatccgcaatggaccctctttgttgtaagccactgatgctttcagattgttgttacagcagcatggcctagccccttgtgatgggaaaacttgcatgagatcccataactggtacat

SEQ ID NO: 484538 - DNA, 122 bp, Homo sapiens
ttttctgctgcagggtcttacctgcaaggcctgcaccagtgtctgtgtgacccaactccacagcacctgccacaggcccttgggagtttccttgtgcttggctcagcagcagactggggtag

SEQ ID NO: 484539 - DNA, 122 bp, Homo sapiens
cacatccaaagagcaaacaccaacaagattattacaaagaccaaaagaaaaaagcttctacagcctcatagagtacccaagccattgccccagttaagtggcttgcagtggcctgcttttat

SEQ ID NO: 484540 - DNA, 122 bp, Homo sapiens
tggaaacgtctcaggttaaggattctgtcctatctttgtgtatgcgtccatcccctactacagctagcatgggacaggacaggtacagggcttaatacataaattgagtagcataataaaca

SEQ ID NO: 484541 - DNA, 122 bp, Homo sapiens
aaaaatgacatgatagcaattctgagcccggccctcaaaagatttggcagcttttgtttacacccttggaactctgccagcttctatgggagcaagcctgggtaatcttctggaagatgaga

SEQ ID NO: 484542 - DNA, 122 bp, Homo sapiens
tgtgagttcttatccattctgtggttctataccttttaagtgcagcatttaagccatttacagtcaatgttaatattgagatgtgaggtactgttgcattcattgtgctctttgttgcctgt

SEQ ID NO: 484543 - DNA, 122 bp, Homo sapiens
ccattttgtgagcagctttatggagatgcccatgtggtgagaaactgagcttcctgcaaacagtcacaagagtaagccatcctggaggtgaatcatcctccagcctcagtcaagcttttatt

SEQ ID NO: 484544 - DNA, 122 bp, Homo sapiens
agaaggtgcctcaggggatgtgctgcttgtggcatcctgtccatcaccagtgccaggctacaagagttgtgttttattcaaacactggctcaagtgatcacaattatattggaatcctatgt

SEQ ID NO: 484545 - DNA, 122 bp, Homo sapiens
acagctcatacactctgcacatctgcagaattagcaccatgtagatgctgcagacgtttacagcctgtacctttttagaacagcaacagagcctgcttgagccaaggctggggcagctgaag

SEQ ID NO: 484546 - DNA, 122 bp, Homo sapiens
tggtgatcaccaaggaggagacacctatggtaaatctgcaccgacagttgggcagtgtatcaaggtttaaccttgtggttaactacctagaagttacagaattggctagttggtcatcagcc

SEQ ID NO: 484547 - DNA, 122 bp, Homo sapiens
ttactatattttttctatgtttagatatgcaaatacttaccattgtgttacaattgcctacagtctccagtaccataatatgctgtataggcttgcagcctaggagcagtaggctataccat

SEQ ID NO: 484548 - DNA, 122 bp, Homo sapiens
ttgttaaggaaagaggaattgactaagttatgcatgactggggaggactcaggaaatttacaatcatggcagaaggtgaaggtgaaggtgaagcaagcttagaccttctcacgtgatggcag

SEQ ID NO: 484549 - DNA, 122 bp, Homo sapiens
ataacatttatgttcaattactgtttccctgttgggtatttgttgcccaactttatgttacagtaggcagtgcacctgaggaaccctgtagctcaatttgaacttggtctgtagcagggaaa

SEQ ID NO: 484550 - DNA, 122 bp, Homo sapiens
aaaaaaaaaaaaaaaaaaaaaaaagagactcattgatcagacctgtatcattttcacttacagccataacataaagtctgagaagataaagggaaacttatgaagcactaagtaaactgttt

SEQ ID NO: 484551 - DNA, 122 bp, Homo sapiens
catggaggctgtggagccacctgtctttgggtggaccatgtagtcatggcatcctatagacagccataaggaactgaatacccaagactcctttataagcaatttgttaagttttacaattt

SEQ ID NO: 484552 - DNA, 122 bp, Homo sapiens
aggcacaagagaagagctggctgctgactctagggcttaggcatgagtaaaatcaggctactgcacccaggactgaggcacaagcaccactgggtctgaggtatgactagtgtgtgtgttcc

SEQ ID NO: 484553 - DNA, 122 bp, Homo sapiens
gtagcattgagctggtgtgctgggggccatactgacagctggtctggtgccaactggctacagctctttatcaaattactggtggaatcagactgagtctgtaagagtcatattagtcaaag

SEQ ID NO: 484554 - DNA, 122 bp, Homo sapiens
tttttattcattttttaatttacttttgtctgactaaattagttcagaggaccagtcttacagctctgagagtctttccacagtttggtctattctgctatttgcaattgtattataaaatt

SEQ ID NO: 484555 - DNA, 122 bp, Homo sapiens
atttaatttgtgaacttctatttaggtttctgacgtgttaatgatgattttctatctttacagacacactccaaactaggcaggatttaatttgagatctttccacaggatgccacaacatt

SEQ ID NO: 484556 - DNA, 122 bp, Homo sapiens
ctgacaagggacagtcagcctagcaagccagaaaacttttaaacaatgattgctctactacagccaaataacacagaaaacattatggccagctgaacctcagtgggtagtctaggctttca

SEQ ID NO: 484557 - DNA, 122 bp, Homo sapiens
aaaaaaaaaaagaaagctacctatattctgctaaggagaacattctggtgtttttacttacagtaaatgcaagcagccatcaggatgatctgactttcaaaacttctgatgttctctaagct

SEQ ID NO: 484558 - DNA, 122 bp, Homo sapiens
ttctttattaatatggagaaatgaaaatgctgacacacagttgtgagaatgtaattattacagccactgtgaaaaacaatatgcaggttttggctgggtgcagtggctcacatctgtaatcc

SEQ ID NO: 484559 - DNA, 122 bp, Homo sapiens
gttacccaggcctgtcttgaattactgggcttaagtgatcctcccaaagttctgggattacaggcatcagccactgtgcctggctaattgtttttttgaagccagaaatgatattggagcag

SEQ ID NO: 484560 - DNA, 122 bp, Homo sapiens
agttatggggcagtaacttcaagggcactgaaggggctggtagcttccaggttgttaccacagcatttgtaaactatcatggaactgataggagtatcatgctaatgagcaatgagggcggt

SEQ ID NO: 484561 - DNA, 122 bp, Homo sapiens
ccaagttttcatgttgatgttcctgttcagtttgatatttatctgaaggctgattgtccacatcccattaggttttccaagctctgtgtcagctttaataatcaggtaatgatgccatgtca

SEQ ID NO: 484562 - DNA, 122 bp, Homo sapiens
taagcccaaatctttctgaccatatagcttatatttattatcactgtattacaatcgttacagcattttgaaattttttgtttgtttgtttgtttgagataaggtcttcctctgtcacccag

SEQ ID NO: 484563 - DNA, 122 bp, Homo sapiens
ggaaggtccatcggcatcatcggccataacctagaacacaccacactcctgtttaggagacagctaagaagaggcctaaacctattacacaaaatttgtgatattaatagcttagctgtttc

SEQ ID NO: 484564 - DNA, 122 bp, Homo sapiens
gaaacatgaatttgggaccctggtgattatcctaaacgtccagcagctagagaatacctacagttatcatcatttaaagcatttgtttatgcatcaagtacagtcatgggaggctgaatgcc

SEQ ID NO: 484565 - DNA, 122 bp, Homo sapiens
agcatgctttgcctccctactccatttacagagttacataaattttgattctgccacttacagcatcatctcaaatatgtgaggagggaggcaagagacctcatttcttggatcctcattgg

SEQ ID NO: 484566 - DNA, 122 bp, Homo sapiens
gaataccagagactgggtaatttgtttttaaaaaagaagtttatttgtctcatggctctgcaggctgtagaagcatggcatcagcatctgctttgcttcaggggaggcctcaggaagctttt

SEQ ID NO: 484567 - DNA, 122 bp, Homo sapiens
tttgagactgggtgtgtgtgtgtgtgtgtgtgtgtgtgtgtgtgtgtgtgttatggaatacagcctcagaataagtttcttggtattgttaagatttaggacttttggcctagaaagaatga

SEQ ID NO: 484568 - DNA, 122 bp, Homo sapiens
aaaagtacttacattggtctacatgtctgtttttgtatcagtaccgtgctgttttggttacagtagcttgcagtacagtttgaagttgggcagtgtgattcccccagcttggttctttttgc

SEQ ID NO: 484569 - DNA, 122 bp, Homo sapiens
aggccactgtgttaagggccagtcagagctcatttggacaggaaggttttctacacattacagctcccaagctgaaagaaagttgtgaaagctggacaggtggacatgggtgggagaggtga

SEQ ID NO: 484570 - DNA, 122 bp, Homo sapiens
aaggcaaatgttgtcttagtcactggtggagaaacagctgaggagtagaacagagtgatacagcatcagttagaattagaaggtgtagttggtttggttcatggtctcaataatcttgtcct

SEQ ID NO: 484571 - DNA, 122 bp, Homo sapiens
ggtagatcttagtcatggactgcatctggggctccatatgaggaaccatttgcagttttacagctttgagtctggaagagacaaacaacaggaggttaaagatacagggattgaaatgtatg

SEQ ID NO: 484572 - DNA, 122 bp, Homo sapiens
gctgctgtaatgaattaccacaagcttagcagctttcaacagcacaaatgcattatgttacagttccatgggttagaggtcctactctgggctcatggggctacaatcaagacgccagcagg

SEQ ID NO: 484573 - DNA, 122 bp, Homo sapiens
gtagagggaaagactgaggcaagttttagtacaggagtgagagtttattaaaaagctttacagctggagaaaaaggaagaaaagtacacttggaagaagaccaagcagatgacttgaaagat

SEQ ID NO: 484574 - DNA, 122 bp, Homo sapiens
ctgctgattatagagccctagggcctagagtgaacataagtagtagccaggtagtagttacagcaggccttaggcaagatccagtgctgtactggcttcaggtctgacatagtgcattccca

SEQ ID NO: 484575 - DNA, 122 bp, Homo sapiens
tggagggaaatgtggctgcagtttgacaagagccatgattaccattccaaatcgatcctacaggtatcaaaggcattaaaggctttaaatagggagttgtatgatgatctgtggaatttctt

SEQ ID NO: 484576 - DNA, 122 bp, Homo sapiens
gctcagttcccgtgtggctggggatgaaagtggaagcttccacatggagatgcaggattacagggaagagactacagggaaacatgaatacatgcagagagaatatttaggagcaattacca

SEQ ID NO: 484577 - DNA, 122 bp, Homo sapiens
gccagggctggtgtgcacagagggatgacctcaaagaggcagcaagaggtcagccatctacaagccaactgagaggcctcagaagaaaccaacaggcactttggtcttggacttccagcctt

SEQ ID NO: 484578 - DNA, 122 bp, Homo sapiens
actggtaaactgtgggtcaggctggccttgtagagagttcctcatctgttcctgttgttacagtctctttcagtaaatgaatggaagagtctaggttatttgggatggagaagaccttgtag

SEQ ID NO: 484579 - DNA, 122 bp, Homo sapiens
tgtaattgtattatttgcccggctgacaccatgatgtggcccagccccagtgagatattactggcctcaggcactgctgtgtggatgggaagggtcagcatttacacaagctcttggtaaaa

SEQ ID NO: 484580 - DNA, 122 bp, Homo sapiens
tgagaggctgcatgcctaaagagcatcctgtgctggctgaggagcctgggcttcatactacagcaaatgggagccatttaaattttcattaggggaataatgctttcagttctgtgctctga

SEQ ID NO: 484581 - DNA, 122 bp, Homo sapiens
gggaagacaattctattgaaatttatgttgagtaataaagatatgacttactagtagctacagcagggaagatttagcactacaacttctgtcctggtatgagtagccaccaaagacattga

SEQ ID NO: 484582 - DNA, 122 bp, Homo sapiens
tggatggacagaacaacacgtagagattcacattgtgaaattttgctccaagaaccactacaggaacatacaagtgaagccaagagaatgcacagacactttgaaggaagtggattgctcct

SEQ ID NO: 484583 - DNA, 122 bp, Homo sapiens
ttcgcagatgattctgcacgatatgcgggaaccacccaaaagtggacagctacagcactacagccccttcctaggacatccctgaaggacagctgtgaaggagaatcttcccagtgggcaga

SEQ ID NO: 484584 - DNA, 122 bp, Homo sapiens
gcaaggagctgagaatctaggagggcagtggtgtaatataactgtgaaatctgccacttacagcatgtacacatttcatggtagcaactcagtaagtacccattttattctttgtatcttca

SEQ ID NO: 484585 - DNA, 122 bp, Homo sapiens
atatgcgaggtaggggcagggaagtactgggtagagaagggcgggtccctggcagggctacaccccagggcctatgcctacagacctaggtgaggacaggcttttctgtttttgtgcccaaa

SEQ ID NO: 484586 - DNA, 122 bp, Homo sapiens
aacccctgagacctcagaaatgtagagccaccagtgtctagcaccagcctggaaaaaccacagtcatgcaacttcaatgtgtaagtgctgaaatgtgggcttatacccagcaaagccactga

SEQ ID NO: 484587 - DNA, 122 bp, Homo sapiens
agccgggtgcccaccactgcatgttgtctgaaggaagaggatgcctccaatgtgcaaatacagcacccagttccagccctgtgccctaggcaaacctgctggtgagggcttttggggcttta

SEQ ID NO: 484588 - DNA, 122 bp, Homo sapiens
agaggcctggaggttgctagaatgggagaagtgatgccaggcagccattctagaggactacaagcaataggttcaataatgaactatcttctatttgctaagggctttacatgaaatatttc

SEQ ID NO: 484589 - DNA, 122 bp, Homo sapiens
gcgggtgcttaaactgtcattttagctcaaccactaccagtccgtgccatcattctattacagcagctgcttccaggtgatgcaggtttatggtagggccagtggatcccatgtttgggtac

SEQ ID NO: 484590 - DNA, 122 bp, Homo sapiens
ctgtgactttgaagggtgcaagccccaagccctggtagctttcatgtggtgttgagcctacaggtgcacagatgtcaagaattgaggtttggtaacctctgcctagatttcagaggatgtat

SEQ ID NO: 484591 - DNA, 122 bp, Homo sapiens
tgaggttcatgactaagattttaaagagtagccagcatgatgtgtgtttttctccagctacagtcaacaactatggtacatgcactaaaaagttgaagagttggactgaaccgtgtttgtgg

SEQ ID NO: 484592 - DNA, 122 bp, Homo sapiens
taaaaaagagttttataagatgtaaaatgggggtggccacccaaggttcagacagatttacaggaatccataatctgggaatgcaacctagaattattagggtggatatatcatgtgtctgt

SEQ ID NO: 484593 - DNA, 122 bp, Homo sapiens
tccagggtttttggagctgtacaggaaaatgctgctgtggtccacattagccacgatctacagctagaggatcccatgggcttctttgggcttcatcaactccttctgagctggaaagagta

SEQ ID NO: 484594 - DNA, 122 bp, Homo sapiens
ctgtgatggcaccacggcactccagcctgggtgacagagcgaaactctgtctcaaaacaacagcaacaacagttacatcagcaaaaaaccaacagaaaatcatgcctctggggtcccttccc

SEQ ID NO: 484595 - DNA, 122 bp, Homo sapiens
agaggtgaagccagtggacttcatgcatcgaatggggacttggagaacttttctgtattacaagaggattgtaaaacacagcaatcagcactctgtagctagcaaggggatcataaaatgca

SEQ ID NO: 484596 - DNA, 122 bp, Homo sapiens
caagtccaactgcaggctggtctgacaggctggagacccaatgctatacttacagtttaacagcagtttgccatagaactgggatggatgagccaatgttgcagatgcaggccaaaggtggt

SEQ ID NO: 484597 - DNA, 122 bp, Homo sapiens
gaggctggcaagtccaactgcaggctggtctgacaggctggagacccaatgctatacttacagtttaacagcagtttgccatagaactgggatggatgagccaatgttgcagatgcaggcca

SEQ ID NO: 484598 - DNA, 122 bp, Homo sapiens
aaagtggtttctgtgtaaaattgagccatatcttgggggtaagagtgggctggtcccttacaggatgtcacagacttggaatgtacaccacatgctctcctggggtggtgtaaagacttctt

SEQ ID NO: 484599 - DNA, 122 bp, Homo sapiens
tagatccttccaacaggattctgcgtgggagtctgctcccacgaagcctgaagatgactacagcactgctgactccttgattgtaatctcttgagattctcttcaactggaggagctagctg

SEQ ID NO: 484600 - DNA, 122 bp, Homo sapiens
ggtaccagctcagccatagtaggatagcgcaccaagtgggttcttaggggttcctgattacaggccttggctcttagactgaatttctggacctgtcctaagccagaggggagccgactgcc

SEQ ID NO: 484601 - DNA, 122 bp, Homo sapiens
agcactggagagaaaattctctgggtccctagcagtgtgtgttgatgttggcagtggctacagtgggctgggtgcactggtatccaggcccacagcatatccatttgagaggtaggtgccac

SEQ ID NO: 484602 - DNA, 122 bp, Homo sapiens
cagtgtgtgttgatgttggcagtggctacagtgggctgggtgcactggtatccaggcccacagcatatccatttgagaggtaggtgccacctgaaggggtagcagctaggagtttagaccac

SEQ ID NO: 484603 - DNA, 122 bp, Homo sapiens
cagaccctgcaagatgacagttggactaaggacaattcaaccaacgagtagccctgattacagctgctatgcatgatgtggcatctttgttagagcagattaacatgtctatgggtagatgc

SEQ ID NO: 484604 - DNA, 122 bp, Homo sapiens
cctgggcctgtggaggatctctggagcccaggagttcaaggctgcagtgggttctgattacaccactgcactctggcctaggtgacagagcaagacccagtctctgaaagaaaaaataaaag

SEQ ID NO: 484605 - DNA, 122 bp, Homo sapiens
gagtcctgggctctgtggttggtgagctgcagaagcagaaggtttgtacacttcacgctacagtaacagaatgtttggtctataaatcaggagctgcaaaaatggcaaatgaggatgttgaa

SEQ ID NO: 484606 - DNA, 122 bp, Homo sapiens
gtgaaaatgtataagtgaaatctgaagtgatggtttcaattttgctaataaataattttacagcaacagtttctaagggatgtgaaaggacagtgctttacctagtattatttgctggcatg

SEQ ID NO: 484607 - DNA, 122 bp, Homo sapiens
ccctggaaaatttcattattataagatgataggagaccagaaaagtaaaataaccaggtacagtaaataagatgaaagaggaacaaggagaatagtgtcctggaagccaaatgaacagggta

SEQ ID NO: 484608 - DNA, 122 bp, Homo sapiens
tccgagaacaagtttgaaaagccaatgagcagtgtgccatggctgtctttccccatactacagctactggcaatgttccaggtggcatctgctttgtcagcagaagtgctggagtgataatg

SEQ ID NO: 484609 - DNA, 122 bp, Homo sapiens
aaccaaagatattagcaaaagtagaagttgctagtgaccttgggaagccgaagctgtttacagtagctgggacaagctgaaagtcagactgagaaataaagagagggccttcaagaagcttc

SEQ ID NO: 484610 - DNA, 122 bp, Homo sapiens
tggacccctgtgtttctggaggtgcatctgaacaagactgggcagtttgggaggctgctacaggcttagtagttggctctgaaaaaaacaaaagaacaaaatatagactgtgtctgccaatt

SEQ ID NO: 484611 - DNA, 122 bp, Homo sapiens
tctctctctgggcgcaagccaaatgcacagcagcagcaggacagtcataccttttacaaacagcagtgactctgagccaggtgatgagccttcccatgttatggctgtctgtgaaaccgctt

SEQ ID NO: 484612 - DNA, 122 bp, Homo sapiens
tcaggtggcaaaactctgaatataccaaaacatactgaattgtagacttgatgatttttacagtaagttaattatgtatcaaagttgttaaaatatctgattggagaatctgtaatgatggg

SEQ ID NO: 484613 - DNA, 122 bp, Homo sapiens
ggaagactccaaatgggaaggagccttccaggttgtacgtggataagagacaaatggctgcagtcttttgagtttctgatcagcctctccaaaggaggactcagatctgcatttatctcagt

SEQ ID NO: 484614 - DNA, 122 bp, Homo sapiens
ctaaatagtgtgtcaatgaatagtggtgattacaggaacaaaaggaatgattattcactacagcaggtcttgttagtgatcacatcattgagtgataaagagatattttgacaaaagaggat

SEQ ID NO: 484615 - DNA, 122 bp, Homo sapiens
gtctcaaactcctgagctcaagcagtcctcctgcctcagcctcctaaagtgctacgattacaggcatgagccaccatacctggccaaagattcaaatttcaagtcaaccaattccattgttc

SEQ ID NO: 484616 - DNA, 122 bp, Homo sapiens
gcctggcttatggatggatggcatgtggacctctaagagaaatggatagctactgcattacagccccacatgggtggcactgaaagatagtgaggaaagaaaatgttctcaggaggcagaat

SEQ ID NO: 484617 - DNA, 122 bp, Homo sapiens
gccagcgtgctgcctttaggacaatggatttaaggctaggaaatgacctggtcagatttacagcttaccatgctagctgagaggaggcagggaggtgaatcagaagatccaggcaaagcact

SEQ ID NO: 484618 - DNA, 122 bp, Homo sapiens
tgaaatcacagggagtggaagctgtcttctggtgctgagtcggttcctgggtgggggccacaagatcagacaagccagtttattgatctgggtggggctagctgatccatcaagtgcagggt

SEQ ID NO: 484619 - DNA, 122 bp, Homo sapiens
gtctcaaactcctgggctcaagtgattcaccctcctcggcctcccaaattgttgggattacaggcatgagccactatgcctgacctataagactcatttggatctaaacaaaatactgtcaa

SEQ ID NO: 484620 - DNA, 122 bp, Homo sapiens
ataatacctacctcactgtgtcattaaaggatttctataaaagacgtagatcacctagaacagcacctaagaagaggggtcagtaaactgcagcatgtgggcccaacccagcctgtgctggt

SEQ ID NO: 484621 - DNA, 122 bp, Homo sapiens
acgtgtacattctgagatggaatttttaacctcactaaatttttatttaaaatgcttttacagctgttaccagtgctcatgtttcataagaacctgcttatgcaaagctgcacgtgggcctc

SEQ ID NO: 484622 - DNA, 122 bp, Homo sapiens
cagatctgtgaactgcagaactgtgagaaaattaatttgtttttcaagccacccagactacagcatcttgcaatgaaagcaccagcaaattagcatatccagttgtatttttattgatgggc

SEQ ID NO: 484623 - DNA, 122 bp, Homo sapiens
catatgtatttacacacatatatccatgtgtactcggtctcaatatcaaaatatttcttacagttacttatggtcaaactgtttgaaatacttgtatttaatttttctggtgtggcttttca

SEQ ID NO: 484624 - DNA, 122 bp, Homo sapiens
atagggtatttgcataatctcaaagtaactctcacaagatatttaggaatattaactttacagcagggaaacttggtagacattaccttaactgacagcatcaccaataataaaagccatgg

SEQ ID NO: 484625 - DNA, 122 bp, Homo sapiens
tatagcattccaggacacagacccacacattcctgacaaacacaaatcaatttggttttacaggagttcataatatcacccctgccaattttaaatatagtgtctatagtgtgtgtgtgtgt

SEQ ID NO: 484626 - DNA, 122 bp, Homo sapiens
accaggctgcacaggaggaggtaagcgttgggcaagtgagtgaagcttcatctgtatttacagcagctccctgttgttcacatactgcctgagttctacctcctgtcagatcggccgcatta

SEQ ID NO: 484627 - DNA, 122 bp, Homo sapiens
atactgctgtatgctaatggaacgcctggctttcacctgagtacatggttgccttgactacagttcccagattcctaacagcaaggtgtggccatatggccaagtgctggccgatagggtat

SEQ ID NO: 484628 - DNA, 122 bp, Homo sapiens
tttaaggtggtttgttaaatagtgataaacaacaagaatatgcaggtgtcacaaattctacaggatatacatttgtatcctagaatttaggagtcattgttataaaaggatctgacattaat

SEQ ID NO: 484629 - DNA, 122 bp, Homo sapiens
caagtgcggcctaatcactgaggaactcaacagacaacactgaagctgactagctgattacaggctaagaagtctatactactgcacccacccagaagcaaagctgaagcaccctacccaac

SEQ ID NO: 484630 - DNA, 122 bp, Homo sapiens
ggcagtgtgacaacagaggcagacattagagtgatgtggccaaaatccaaggaatgcctacagccaccagatgcaggaagaagtaaggaacaggtttccctagagcctccaaaaggagagtg

SEQ ID NO: 484631 - DNA, 122 bp, Homo sapiens
gccatcctagtattgtctttgaaaagctttgggccttccttcacaagtgagagaggtctacagcttctcattgttgtacatcaggtacatcattcttgttagcctaggttataccacacacc

SEQ ID NO: 484632 - DNA, 122 bp, Homo sapiens
ctatacagaaaggatgatgctggcatctgctcagcttctggagaggcatcaggagaattacaatcatggcaggaggtgaagggaaaacaggcacctcatgtggccagagcaggaacaagggt

SEQ ID NO: 484633 - DNA, 122 bp, Homo sapiens
atctgaagtaactcccatcatcaccccacagggttatgttctcatctcggctcttgcttacagccattggaatactgaccacattggcaattgacttagttggatacttgtttattggtgag

SEQ ID NO: 484634 - DNA, 122 bp, Homo sapiens
gaggtcaatgggaacaaacattgtacctcagtagcttccaacttcctgttctttgcattacagcactaccaggaactgtaatgagaaatgccacttctagagatttgagtaactttgctctg

SEQ ID NO: 484635 - DNA, 122 bp, Homo sapiens
gtcttgaacttctaagctcaagtaatcctctcgcctcagcctccaaaagtactaggattacaggcatgagctgctgcatttggccattttccttaaggctcaaatgagcatgaaaatactaa

SEQ ID NO: 484636 - DNA, 122 bp, Homo sapiens
tgctgggattacaggtgtgagccaccatgcccagcctgtattaaatgcattttcaatttacagtatactcaacttatgatgggtttattgggatgaaacccagtgtaagtcaaggagcatct

SEQ ID NO: 484637 - DNA, 122 bp, Homo sapiens
gacatggcacgaaaagccacggatgtcagtctgagttaaggttagagtagatacatacaacagtcataagagaaaaaaacttactaatctatgatctccagttctggtaacctctagggtcg

SEQ ID NO: 484638 - DNA, 122 bp, Homo sapiens
ggtggcaggttgattacactggatcacttccatcatggaagtggcagcattttgttcttacaggaatagacactctggatatggatttgcctttcctgcatgcaatggtgtgatcttggttc

SEQ ID NO: 484639 - DNA, 122 bp, Homo sapiens
gtctcaaacttgtgggcttgagtgatcctcctgcctcagtctcccaaagtgttgggattacaggcatatgccaccattccagtcacaatctggctttgtaaatggattatgccaaaagtaca

SEQ ID NO: 484640 - DNA, 122 bp, Homo sapiens
aaaattatatttgactcaaaactatttgacagaagaattctaaaatagcttatgatgctacacttctaagtttttaaaataaggttaaggttaaaataaattttattgtgattattatagac

SEQ ID NO: 484641 - DNA, 122 bp, Homo sapiens
aaaatgaaatgccactttttccctcatcatggatgactttgttaagatgaaccccttttacaggaaaggggttacacaggctgctgataccagtctagagagggcacccaccagccaaggct

SEQ ID NO: 484642 - DNA, 122 bp, Homo sapiens
ataaagtctatacttgggaatgatgttgttttgtgtggttctttattagaaagacaacaacaggcattgtgagaggagagccaatccagatgagattttcttggtgtggttctagcatgttt

SEQ ID NO: 484643 - DNA, 122 bp, Homo sapiens
ttattcatttcctctaagtttatcaaatttgttggcatgtatttgttcataagtcttttacaatcctttgtatttctgtggtatacacctgatagttgcaatggctttttcatgtctgattg

SEQ ID NO: 484644 - DNA, 122 bp, Homo sapiens
tgttggttttttctcatctctgtgtgtgagtatgcctttaactgcagtgtagcttgattacagtcagtagacttcttttctggttgtattcacagggctgaagctttgtgcagggttggtct

SEQ ID NO: 484645 - DNA, 122 bp, Homo sapiens
gcaccacaaatactgagggacaactgtatgtgaggtttggaaacacctcataaaaatttacagacttatcagttatctaatgcaactgttcctctgacatgagtcatgtgcgggcctgccag

SEQ ID NO: 484646 - DNA, 122 bp, Homo sapiens
gacagctgaatttgagtattgttaattctgtaatcaccatcaatgcatcacttcagcttacagcagtgggctccagtttctttgtgcttattatggggactggactggaatgctggagcgtt

SEQ ID NO: 484647 - DNA, 122 bp, Homo sapiens
ttatatatttaaggtatacaatttgatgatttgatatacacatgcattgtgaaataattacagtctctgattaattactgatgcctcccttgggatgggaagagatagcaaactgtacctca

SEQ ID NO: 484648 - DNA, 122 bp, Homo sapiens
atcttctgaaatctaggtgaaagttgccaggcatccttcactcttacgtctgcacaattacaggcttaacaccatgttgaagctgacaagacttatggccaaaaacttctggagctgtggcc

SEQ ID NO: 484649 - DNA, 122 bp, Homo sapiens
gggaaggtgagagggatggtgagagggaaggtgaggcagaaacagcagaaacacatttcccaagccaaagaaaaacccacagatcacagggctcaccaagttcctagcagtattggtgagaa

SEQ ID NO: 484650 - DNA, 122 bp, Homo sapiens
gcgcagggtccctctgctgtgtgcaggctagggacttggtgtcctgtgccccatccactacagctgtgactgaaaggggccaaggtatagctcaggctgttgcatcagcaggtggaaacccc

SEQ ID NO: 484651 - DNA, 122 bp, Homo sapiens
agacagagtttcactgtgcttcccaggctggagtacaatggctattcataggtgtgattacagcacactgcagccttaaactcctggcctcaagggatatttttgcctcagccttctgagta

SEQ ID NO: 484652 - DNA, 122 bp, Homo sapiens
aagacacagaggtaggtatcaaaactcaggtctgactccacacagtaggtattctggctacagtcatacaccataaaattgagactttgaacttgatctatagaaccatcagaagttgttaa

SEQ ID NO: 484653 - DNA, 122 bp, Homo sapiens
tgtactgcagaactgtccaacatggatgctgggggaggctgccacctactaagtgcattacaggaactggctgctagagaagctgtgtgcactgagtctagtgctagagaaagccacgaaca

SEQ ID NO: 484654 - DNA, 122 bp, Homo sapiens
aatctaggcatccagcaggtaggtgtgcatggtggtaacctaacttatccagggcttgtacagtacttagcacatgcagacattcttgagaattttctgttgaatcagttaaagtccaacat

SEQ ID NO: 484655 - DNA, 122 bp, Homo sapiens
ttagctgagctcacaatcagctgatcacactggggatgacagtttatttaagtaatattacaggcaaaaatgtacaatatatttcagtttgctattttaagctgctgttcaccttagcccct

SEQ ID NO: 484656 - DNA, 122 bp, Homo sapiens
tgaattctttttcaagctgcattcccagtcaggactgcccacctcagcatttctgatttacaggagaaaaagaaaaccccatgtgaattaaccactgcagtaagggctctcttacatgcagg

SEQ ID NO: 484657 - DNA, 122 bp, Homo sapiens
aaaccatagatttgttttggagaaaattgtttacactccttgagttcattctagcctttacagtttagcagacaccaacatgatccaggtttgatttaatgtgatacttaaatttttgctta

SEQ ID NO: 484658 - DNA, 122 bp, Homo sapiens
ctgacattgaactttcattccttctatatttgctttaatctacctgagtatgaatgtctacagtatactaggcaatattctaggctaggctgaatatctgtccctgttctcacagagctaac

SEQ ID NO: 484659 - DNA, 122 bp, Homo sapiens
tttatacattattttaaaaagaatgaagggtaacttaaatctaaccatttgtgggaattacagcatttgaaggtttttattgcatagaaagtggtacaaaaaatataatagtaggcctggca

SEQ ID NO: 484660 - DNA, 122 bp, Homo sapiens
atccagtcacattaagaacccagtcatgaatatgtgccttcaaatgcacattccgggttacagcaactgggttagacctcccagagcagcccatatatttccatcaggtcccccaaaaataa

SEQ ID NO: 484661 - DNA, 122 bp, Homo sapiens
accaacagtcgcatttattatctatttttaactcagtttaggcagcttttgttttaaatacagcctcccagtttgagtaaatgatgggtaccatgtcacatgtctgagtggctccacttaac

SEQ ID NO: 484662 - DNA, 122 bp, Homo sapiens
cattggggagagaacacatttccttgcagttgatggcagtttcagtcatggtttctgttacaggcagctgaaaacatccagctgtacagcagccttgctagaaacagtctccctctccatgg

SEQ ID NO: 484663 - DNA, 122 bp, Homo sapiens
actgtgagcaataaatttcggttgtttgtcagttacccagtctaaggtattttgttgttacagcagcatgagtgaactaagaacctcactttcctgcctgctttgtgtgtgtttggtttttg

SEQ ID NO: 484664 - DNA, 122 bp, Homo sapiens
tttcacaacttgattgttatttcaccctctgtaagttactatttctacagtttttgattacagcctgatgaaatcattgcagtgtcctaaagcatgtgctgtgtaaatattctcagagtatc

SEQ ID NO: 484665 - DNA, 122 bp, Homo sapiens
gcactgattggtgcatttacaaacctttagcgagacacagagtgctgattggtgcatttacaatcctctagctagacataaaagatctccaagtccccacctgactcaggagcccagctggc

SEQ ID NO: 484666 - DNA, 122 bp, Homo sapiens
ctgaaaccttggatgcctcttgctgccctgacatgagagtttgaccaacttggcaccatacaccccacagactacagaaaggtgacagttgggtgtatatccagtatgaaagcctggatgca

SEQ ID NO: 484667 - DNA, 122 bp, Homo sapiens
tcttcttgtgcttaggaacactacagcactccagcactacacttgggggccatttgaaaacagcagttaacatcaacaaacacaaagatgcaaaaaagaggtgctaaatagatcccaaaaag

SEQ ID NO: 484668 - DNA, 122 bp, Homo sapiens
aaccaaggatattagcaaaagtagaagttgctagtgaacttgggaagccgaagttgcttacagtagctgggacaagctgaaagtcagactgagaaatgaagaaagggccttcaagaagcttc

SEQ ID NO: 484669 - DNA, 122 bp, Homo sapiens
ttggattcatttgattgtcacagggctgaagggaaatagacggctttgagctataatttacaagacttcatgatggattggatctagtggtttaagcagaagcagctgttgaacaatgtttc

SEQ ID NO: 484670 - DNA, 122 bp, Homo sapiens
aaggcccacagggagggggagcacagtgtttatagccagccatgctaattattagctttacagactggattctcagtgagaaatacacaaacccaggaacacacagctgttcacatggatat

SEQ ID NO: 484671 - DNA, 122 bp, Homo sapiens
taaacatagaacatgcagagtaaaaatacggtgtgaaagacaaaatgtggtccacctgtacaggacatttaacatgaatggagcttttagtactgcaagttgctgtgggtgagtcagcaagt

SEQ ID NO: 484672 - DNA, 122 bp, Homo sapiens
tgagcagttgaagtcctttgcaagcttgaaaatgctctagactccttctgggaaagacaacagcagtcaccttgtactgtaggtcagttgcaaaggctttgccctcccacagtggtgggtgg

SEQ ID NO: 484673 - DNA, 122 bp, Homo sapiens
ttgcatttggctcctttgcaacaccagttgctgcctattaaatttagcatctcttggctacagcagtcatttctctaaggaaaggggtgctttcacagagccaccttgagagactgggtgac

SEQ ID NO: 484674 - DNA, 122 bp, Homo sapiens
cttttttgggggctttctattctgtcccattggtctatgtgtaccatgctgttttggttacagtagctctgtagcatcatttgaagttgggtagcatgatgcctttaactttgttcttttgt

SEQ ID NO: 484675 - DNA, 122 bp, Homo sapiens
cgatttaagtcctctggttttgatttggtcccaggggtcgtatccacatctatgcactaacagactatgctataatgagcacttcctaattcaggactggtgtttacccaacaaacgatttc

SEQ ID NO: 484676 - DNA, 122 bp, Homo sapiens
cctgtattctggtaacttaagataacttctattaagttgtaaactccttggtacatcccacagtcactgttcatcaagtacctattgaatgaagagtatgttgtgctcactaaaaaaaactg

SEQ ID NO: 484677 - DNA, 122 bp, Homo sapiens
gtctcaaagtcctgagctcaactgatcatcctgcctcggcctcccaaagcactgggattacaggcatgagccactgcactcagctgaaagggttttcttgactaccattttccactgacttt

SEQ ID NO: 484678 - DNA, 122 bp, Homo sapiens
gtgtggtccctactcttgtctctgccctcatttgagatttaactaagtcttctttaactacaggatgtgatgcagcaggccaccaatgcaattcttaggggtggcaccattctggctcccac

SEQ ID NO: 484679 - DNA, 122 bp, Homo sapiens
agtcacatggtccatgcagaccccactctccttttctatttacttttgaggccagaactacagccccagtgatcctgagatagtcatgatttgagcagacaaactcacaaggctaggtggga

SEQ ID NO: 484680 - DNA, 122 bp, Homo sapiens
aaagccggggtgggcctgggcaggtgaaccctgaggctccgccaggagcagccccagctacagccaccatggatgtttgctgggttggatcagcactctcacctgctgaatggttttgcctg

SEQ ID NO: 484681 - DNA, 122 bp, Homo sapiens
gtggcaatgtactgcccttggatgtggccaaaacatacaactatcttggctacaaatttacagcactggatgtcaggcccctttgcaagatggctggtgggctgtgaaacagaactgggagg

SEQ ID NO: 484682 - DNA, 122 bp, Homo sapiens
tctatatgagtaccatatttttataagtcagtggtctgactggtttcattttagaattaacagctgcttcaatatgttattcaatgttaatgtttggctgtgagtagaatatgtaaaagtgg

SEQ ID NO: 484683 - DNA, 122 bp, Homo sapiens
tatgacccaggttttgagggaagataaattactctctgtaaaaagagatgctaagtactacagactattataaatgatagctaattaggggtgtttgactaatctgtattctaatatcctaa

SEQ ID NO: 484684 - DNA, 122 bp, Homo sapiens
cttttgaggatccctatggtcttaaggatatttatttaattatttagttacagacagttacagtcattattctctttgatagttgtcctaaatttggctgatgggagcccttgcttcctgtg

SEQ ID NO: 484685 - DNA, 122 bp, Homo sapiens
aatcattactggaaaaagggaaggagtcaaaacagtatctttgctacaagttcttcattacagccaagacaacactggctcagaacagagccaggatgatatatacttggaatagaggagta

SEQ ID NO: 484686 - DNA, 122 bp, Homo sapiens
aaaaaaagattcctctgattgctttgcgggagagaaggaactcttcatggtttcagactacagcactgcctaccttgttatcttaaatctctgatagtaggaagctcttcctggtatctagt

SEQ ID NO: 484687 - DNA, 122 bp, Homo sapiens
ccttgtgccaggcactgtgcttggtgcttttcatgcattatcaaaatataattgttactacagccctgtgagagtagctaattttattaattgcattttccagatgagaacactgaagcatt

SEQ ID NO: 484688 - DNA, 122 bp, Homo sapiens
aaaagaaaatatatacatgaatgggtgtggctttacactttatgtacaaaactttatttacaaacataggcaacaagctggatttggcccatgggcctgtagttgaccaatccctataatat

SEQ ID NO: 484689 - DNA, 122 bp, Homo sapiens
cattactaacctattttcctgaagagcccagatgcagcctgcaaatcctcaacagtgctacaggcaactattggagatgggacagggcagaattaaacctcacttgtcattgctgtatgggt

SEQ ID NO: 484690 - DNA, 122 bp, Homo sapiens
tgaaggggcatctcttacgctacatttcctaaatacgttgaccatagtacatgatttctacagcacttctcttaagcctcttgaaagagcattccatggtttgggaaatgctattctaaatc

SEQ ID NO: 484691 - DNA, 122 bp, Homo sapiens
ttctgtaaaggaatttgtaacagcatcaaccagttgcctgggttaaactattcttgattacaggcagcaaactctggtaccagatggctgtcctggaaaatggaatggctacttgtgattct

SEQ ID NO: 484692 - DNA, 122 bp, Homo sapiens
cttgaactcctggcctcaagcagtcctctcctgccttggcctcccaaagtgctaggattacaggcataagccaccatgcctggccaggaaagccagtttttaagatgtcagagaaaaaacat

SEQ ID NO: 484693 - DNA, 122 bp, Homo sapiens
attctacatagacttacccctgtatacctcttgatggtcttttttaatgtctgttgattacagccacactggccctgatattacttgaacaagccagtcattctggtgtttgctattccttc

SEQ ID NO: 484694 - DNA, 122 bp, Homo sapiens
tacaattcaaggtgagatttgggtggggacacagccaaaccctatcacttatcattattacaggcatcatctttcaaaagtttccactaattggatgatgaatgatttattgttaatgatta

SEQ ID NO: 484695 - DNA, 122 bp, Homo sapiens
agccaggcgcagagcagtgaggggtgtgtgctcaagcaagtgtggggtccatccactgtacaccaccaggcatgctagctacagcagggtgggaagctccatgtcaggctgcagctgaacca

SEQ ID NO: 484696 - DNA, 122 bp, Homo sapiens
gacttctgagaatctgtgattctaccaatgacaacaggaaaagggttaatgttactattacagttattgtaacagttttacaagcaataatacctgatcctgataggacaatttaaaaatgc

SEQ ID NO: 484697 - DNA, 122 bp, Homo sapiens
tgaatgccccagcttgagtcaaaggctaatcccctagctatgccacatgactgtgatttacagtcctcaaaggctgcattcaatgacaagaaagaactcaccaaaatcaaattggtatcagg

SEQ ID NO: 484698 - DNA, 122 bp, Homo sapiens
gtaggtacatttggatgtgtagcacctactagaatgatggtttgctgccagaggctattacagtacctgcaaaatcttggatttctatatgtacagcctgtgtgattgtgcatgtgtgtgtg

SEQ ID NO: 484699 - DNA, 122 bp, Homo sapiens
gtgtcgattggtgcattcacagaccctgagctagacacagggtgctgattgatgtatttacaatccctgagctagacataaaggttctcaaaggtcccaccaaattagctagatacagagtg

SEQ ID NO: 484700 - DNA, 122 bp, Homo sapiens
tgtgtggacaggttgtcctgaagagtgtagaggagaccagaaatgggtagctcctatccacaggcaggtcatctcaaacaaagtagaggaatcctgaagtgggtggctcctatctgcagtca

SEQ ID NO: 484701 - DNA, 122 bp, Homo sapiens
ttactgccctttcttttgtcttttcatagcttttggtgcggacatgtcttggagcagttacagtcaattgtctctatgctcaatttgcttgtttattccatgaatactgagcgcccattatg

SEQ ID NO: 484702 - DNA, 122 bp, Homo sapiens
agcttgaacccggcatagggacactccagtgagagacaatgaggattggcttacttgctacagcactcaggaggaagagtcagtgattaccacacatgtggggaaaaacaagttagatacaa

SEQ ID NO: 484703 - DNA, 122 bp, Homo sapiens
ggggtgtgtttcttgattaaaagtatttaaattgaccaatatttatgataaaaccaattacagccacagtctgcaggccagatatagtctggaggttccctgtttaagatcccttaacaagt

SEQ ID NO: 484704 - DNA, 122 bp, Homo sapiens
tgcagtaaggttgctgacttacagccttaaaatacctcctcacaattcaaactggaattacaggactacatttgataggttcatctggagtcatttgccacatttgggggtgtgtaaggcag

SEQ ID NO: 484705 - DNA, 122 bp, Homo sapiens
tactagtaactgccttccatcttatacataaatgaatgactatcagtcagagccaatttacagccttgatcacttgcaggaggatggttagtggactgtagataataccttgaagatttctg

SEQ ID NO: 484706 - DNA, 122 bp, Homo sapiens
gaatcaacctcctgggctcaagctatcctcccacctcagcctctgaagtagctgggattacagctgtgcaccaccacacctggctaattaagaaaaatatttcttgtagagacaggggtctc

SEQ ID NO: 484707 - DNA, 122 bp, Homo sapiens
atcagcaacacttccagcccccacagccaaaaaatatattttctgtgtaatctaatcttacagccctgtaaggtgagttgtgtgaaccccattttatagacacagaagctaagactcaaaaa

SEQ ID NO: 484708 - DNA, 122 bp, Homo sapiens
gtcatctggtttgaaacatcaacagaaaaatgaaggtcttggaaatgaggaacaggtatacagcagcaaaacatgtgatactgaaaaacagttccaagagctgccttcctgaaacgggtgac

SEQ ID NO: 484709 - DNA, 122 bp, Homo sapiens
aaatgtccttatttaccagtccctgcagggggacaggagatgagcaaagtgctgggattacaagcattagccactgtccccagcctgaaactctcttcactggactcaaaaggctaatttca

SEQ ID NO: 484710 - DNA, 122 bp, Homo sapiens
ccctactgcgtagatcgaggatgctgcctttacccagtcttcatgaagttataaaaattacagccatttgtcacaggtctctcaacacagcactgggccctgggaggaccaggccacatctc

SEQ ID NO: 484711 - DNA, 122 bp, Homo sapiens
gaaaacacacaataatgttggctgtcttctctcaagttttaaatctcacaatcagacttacagggcaacactcaccaacagcaatgtcacaaaggatcaaggtttcataaaatttgagtcca

SEQ ID NO: 484712 - DNA, 122 bp, Homo sapiens
actcaggaggctgaggctggagaattgtttgagcctgggaattcgaggctgctgtgattacaccactgtactccaacctggatgacagagggagcaagaccctgtctcaaacaaacaaacaa

SEQ ID NO: 484713 - DNA, 122 bp, Homo sapiens
catcagagagattggtgactttagccatgcaaagggtggctgccaaggttttgtgggcaacagctgtgtggccaagtgtaactggttggctttgtggaagattgtctctcctgacagggctg

SEQ ID NO: 484714 - DNA, 122 bp, Homo sapiens
gcgcttagtaaatattcaacaaatgttattagcaatttgctgtctgtaaggacacctctacagctactcagaatattctgagagctagtgggttcttggctaaggggaagatgaagagtatt

SEQ ID NO: 484715 - DNA, 122 bp, Homo sapiens
gtatgctatgtagttttagacactggggttttggttgtaccatcagtcttagcctccagacagccattattgcaatattgcaggcacctgtgtgaatgtggtgaaataatggtgggacctta

SEQ ID NO: 484716 - DNA, 122 bp, Homo sapiens
gacataggcatgcccagtttctggacatcgactctggccctgtgctggcaactgagggtacagccaaaaattggaccctccagagcccatggaggggctccaaggtctcagcacaagaccca

SEQ ID NO: 484717 - DNA, 122 bp, Homo sapiens
aaatcatgtgagtgaacttgaaagcaaattccacgcctcagttgagtcttcagatgactacagcccagactgacagcttcactgcaacctcatgagagaccctgagccactccaggttcctg

SEQ ID NO: 484718 - DNA, 122 bp, Homo sapiens
tacgggtcaggaagttaatttttgttctggaaaaattgtttttagggaatcacatttaaacagtcagagacaagctatcacaaggtgatagcaaggttgatgaattctggctctgtgacttt

SEQ ID NO: 484719 - DNA, 122 bp, Homo sapiens
tgatgtatattaaagcccagattccacacctagatatctaatacacaggagactgagttacagcacatccaaacaaggaatcctatgctgctgtgtcagtgataatgaaaatgaatatttct

SEQ ID NO: 484720 - DNA, 122 bp, Homo sapiens
ctcaggagtttaaaatcatttaacattcaaggaaatacaccaccaggagcaaaagatcaacagtcagaaaagtcagacccataaagacttcagaatacatgatattgcatgtttaatatatt

SEQ ID NO: 484721 - DNA, 122 bp, Homo sapiens
tgtgagatgtcttagcaaattatcaaacctgaagaggggtttgtgggaacccccaaattacagctaagttggacaaaaattgagtaacctggagactcattacttgcacctggtgtctgaag

SEQ ID NO: 484722 - DNA, 122 bp, Homo sapiens
tagtcttagagttgcagcagtttcgttcagtagttattagataaagctggtttcaggttacagcaggcagtttcagcaactgagcttgtgtaaaatttatttcttggagcaatattatgagc

SEQ ID NO: 484723 - DNA, 122 bp, Homo sapiens
agaagccagcagtggctcagtccaagtccaaaagcccaaaaaccacaaaagccaacagtacagcctttgatctacagtcagaggcctgaaggcccccaggtagctgccaatgcaaatcccag

SEQ ID NO: 484724 - DNA, 122 bp, Homo sapiens
cacaggatgaccacgtgatcatatgagtgagtagcagtgatgggcattgacaagggaagacagcacttgacatctaaggtgccatgatgctgaatataatgatctgtccttactagaatttt

SEQ ID NO: 484725 - DNA, 122 bp, Homo sapiens
tgctagatgccaggcacaacataggagattcaatgtccaatgatgagcaaaaaatggatacagctcctgcctttatgccttttgaagtaacagtctagaggagcaatgaacactaatcaagt

SEQ ID NO: 484726 - DNA, 122 bp, Homo sapiens
actgactggcttcaagttgcaattcccattttgggttcaattaattgctggagcagctcacagcactcagggaaacacaattagtggtttattgtgaaagatattgcacaggatacagacga

SEQ ID NO: 484727 - DNA, 122 bp, Homo sapiens
ctcactttcctattagtgctggtttaagcccttcatgacctacttcccttttttggacttcagcacctaaatcatgattggtttacaaataggtgaaacaattctaacagtctgattacagc

SEQ ID NO: 484728 - DNA, 122 bp, Homo sapiens
ggtttatgggtcaaatttacctaacaaattgttttctgttttttcccacctcccaaaatacagtcagtaatctttgggcaattccaattcaaattatgacatattctgacttggtggagttt

SEQ ID NO: 484729 - DNA, 122 bp, Homo sapiens
gccatgttcagaaatgcattcttgtgtttgagtgaggccacacttcccaggagctccttccagtcaatgagtgaccatggcagaaatattaaggtctgaatgttgcaggaagtcagggaccc

SEQ ID NO: 484730 - DNA, 122 bp, Homo sapiens
tttcaggggtggggtgatgggagtagaatgaggagatgtaggtcaaagggcacagagttacagttacatagggtgaataactctagagacctaatgtacaggatgaggactctggatatttc

SEQ ID NO: 484731 - DNA, 122 bp, Homo sapiens
acatttcaccgatagcaatgaaatgtacactatgcgaacaccaaaaagatgctgaatttacagtagggagaaataatagggagaaaattatcagtagagaaaccttagatttttttttttga

SEQ ID NO: 484732 - DNA, 122 bp, Homo sapiens
gtataggtatgattactattttggtgaataataggcacatggtagactgaaattcggcaacagctactgtgcaaataagcatatctgtgattatggcttatatctggttggggacccctgtt

SEQ ID NO: 484733 - DNA, 122 bp, Homo sapiens
gacccagtctccctgatggcttgcatataaggttttttaaaggcggggaggcagaaattacaggcaaagtcataaatcaagacatagggatttacattggtttgatctaaaaaagtgtgata

SEQ ID NO: 484734 - DNA, 122 bp, Homo sapiens
tgtgatagggagtgaaagaaggagtgtgcagaatatgagaaatgtcatactaaggaattacagcttttatctcacaggtgtgtgatggggagtcagtaaagcattatatgcaagtgacaagc

SEQ ID NO: 484735 - DNA, 122 bp, Homo sapiens
gtcacagaaaggatgggactagccattggagtccttacccagactcgagggactaccatacagccagtagcatatttgagtaaagaaattgatgtggtcacaaagggttggcctcattgtct

SEQ ID NO: 484736 - DNA, 122 bp, Homo sapiens
ttgggaactagtgtggatgaggttccagaaagatggctgcaaacaacctcagggcatctacagcctgcctctgtctgtcactgggtcctggatgtgtgggtgtgtctgcctggtgtagaaag

SEQ ID NO: 484737 - DNA, 122 bp, Homo sapiens
gtgggtttgtggtctcactggcttcaggagtgaagctgcagaccttcgcagtgagtgttacagctcataaatgcagcatagaaccaaagagtgagcagcagcaagatttattgcaaacagtg

SEQ ID NO: 484738 - DNA, 122 bp, Homo sapiens
ggtgggttgggaggtgcaaatggtgaggttttacaaccaattgaatttatataatggctacagcaacattagtcttggaaacccagtctcactggtcatggagcttttgtagatcaagtaaa

SEQ ID NO: 484739 - DNA, 122 bp, Homo sapiens
atggccttcttaatctggtttggccctgagaaggcagccactgcatgtcacacatggctacactcttgaaaagtgctggcccctggggtcttgtgacagtccatagcagcagcaggcagtgc

SEQ ID NO: 484740 - DNA, 122 bp, Homo sapiens
agggcctccaccaggattacaggacctatagaaagacatttggaagtgggtgctgagttacaggcagggttaggtgacttgtgttttgactctattatgaatgtgtcatgtttttgggagta

SEQ ID NO: 484741 - DNA, 122 bp, Homo sapiens
agagtctcctctaaagagcaggccttggtgtagggacccccttgagctgcaaggacagaacagctcttcaaaggtgctcagggagaagtggagaaatgttgaatttcatgtatacttggcct

SEQ ID NO: 484742 - DNA, 122 bp, Homo sapiens
ctgtgattaaaaaggaaaggacgggcctcttaaagtaggtaacgacggatgcagtgactacaggacctgagatacaacctgggttaaatctggttctgccacttacctgctacgtgaccccc

SEQ ID NO: 484743 - DNA, 122 bp, Homo sapiens
tgcagggcctggggctggggcagggagggcactgccaatctctaagtggcacagcacctacagcctgcctgggttcatttcaggcaaaatgtgtgtgttctctttagggtgaggcaagagcc

SEQ ID NO: 484744 - DNA, 122 bp, Homo sapiens
gaggagagtggataacagtctccatcacgcgcaaaagtggaagcatgtcagatgcgtttacaggagttgaacagggagtggcattgatcttggcaagctggcaagaatctcctactatttta

SEQ ID NO: 484745 - DNA, 122 bp, Homo sapiens
aacaaggttttggaatttgactctggtttcctgcatcttggcaccctaatttaggggctacagtacaggcttgcaggcttgggtttctctgattgctcaaatttttcatgtgttgcttgaag

SEQ ID NO: 484746 - DNA, 122 bp, Homo sapiens
ttgttgtatagaaatgctactgacttttgtatgttgattttgtatcctgaaacattactacagtcatttatcagatctagaagccttttggataagtcttcatgtttttctaggaaaagaat

SEQ ID NO: 484747 - DNA, 122 bp, Homo sapiens
gtgtgatgtgaaaggtctgatgatcattcgaaccttggtactctgattcatctgaagttacaagacatgaacaagggaaagaactatattgaaaaacattgcatggatggttttggaaataa

SEQ ID NO: 484748 - DNA, 122 bp, Homo sapiens
tttatagttgagtgactgcagttcccactgttagatctgacacacagagaaaagtaattacaggactcttcaaagatgcaggtgctgccctcacaaatctgtttcacaaggcattggtcaac

SEQ ID NO: 484749 - DNA, 122 bp, Homo sapiens
cattaatgcaaaactgaaaatattgctaaattattgtggctaatataatttgtgtctgctcaggctttgtattagtttgctagggctagtataagaaccacaaactgggtggcttaaacaac

SEQ ID NO: 484750 - DNA, 122 bp, Homo sapiens
aaggaaaaacattagactggcagttgggaattttcaatcctttcgcatgtttttatttaacagtcacaacactttataggcctttttgctaaagagaaactaaggccagaagaagaggttga

SEQ ID NO: 484751 - DNA, 122 bp, Homo sapiens
gagaaactcaaaggaaggaaaagtgcacagagatgagggtcaggtccagacctggacccacagctcaaatgcaattcattaatctttgacaggtatgaaactgagttgctggtgatgtgtga

SEQ ID NO: 484752 - DNA, 122 bp, Homo sapiens
ggtgacatttaagctaagaccacgtgaaggactgacaaagaaacagtccaggagacacaacagcaacaactctggacttagtaattgggggcaatagagaacttagagaagttagcagaagc

SEQ ID NO: 484753 - DNA, 122 bp, Homo sapiens
cagaaaatcagtgtactagaatttacttgtgttaaatgaggttgccaggaggttgcactacaggattcaggcttttcatgagttattcttgttactggtcactgttagaacttgacttttgg

SEQ ID NO: 484754 - DNA, 122 bp, Homo sapiens
ttctttataatttacccggtcttaggtatttctttatagcaatgggacaacggcctattacagctccttactatctgaatggtagatagctttctgggccaaacttgtgctctagaacacag

SEQ ID NO: 484755 - DNA, 122 bp, Homo sapiens
taaaatataaatggaaaatctcaaatatttacattaattaatttaaggcacccatgtttacagccattacccaggtcaggagatagaaccttgccagctataccctgaagctgttcaagtct

SEQ ID NO: 484756 - DNA, 122 bp, Homo sapiens
aattattacttttagtacttttcactctcctacatgtctcagtttgaacaataaattatacagtcaccagtcccaggaaaagatgaaatatgaaaaagatgccagcagatttagcaattgct

SEQ ID NO: 484757 - DNA, 122 bp, Homo sapiens
tacatgtgactggcaagcccagtgagtcccactcatgagggcaggggcttgtgatctgtacagccatggagggtttctgccatgttcccctggatagcacccctttgcagtgaagaaacaga

SEQ ID NO: 484758 - DNA, 122 bp, Homo sapiens
gtctcgaactcccaggctcaagcaatcctcttgcctcggcttcacagagtgctgggattacaggcatgagccactgcacccacctgcagattgagggaggggcatttttgaggatagaaaac

SEQ ID NO: 484759 - DNA, 122 bp, Homo sapiens
aatgagtgacatctctatattcttctcaataataatatattacattcagatgttgctttacagctcacagagctagtgcctttaacacagtagttgcttcttctaacaacttaggggtaaga

SEQ ID NO: 484760 - DNA, 122 bp, Homo sapiens
aaataaatattacctaattgggaactctaggagagctcacaagtaggcataatgcaattacagcctttggactttgaccaagatgccagagcagatgccttgggtttgacaggaggatcatt

SEQ ID NO: 484761 - DNA, 122 bp, Homo sapiens
ctgagatcgcgccactgcactccagcttgggcgacagagcgagactccatctaaaaaatacagctgtatcaaatctgcttgtgctttggccatctgagaggtgagaatcttctgtttttgtt

SEQ ID NO: 484762 - DNA, 122 bp, Homo sapiens
tctgtctcaaaaaaaaaaaaactatatatatagatatagatacatatcttcacagtagtacagccatatgtcttaagcatgaccaatctgctgtgaaaagtgtctcttaaaactgtgttcat

SEQ ID NO: 484763 - DNA, 122 bp, Homo sapiens
atgtgaaatattccctttctaggaatgcaagaaacaacaccaggaggtcatatcagtttacagaatgcatcttctgtatgctgtgcaggtatggttatgccccttgaagtatctggacatcc

SEQ ID NO: 484764 - DNA, 122 bp, Homo sapiens
cagccattttaaagccaattaactctgttcctgttcacacccttattaaaaatataattacagcagtagtctccagggactgtcattgggtaggctttaccaaggtaaattagccaagaaat

SEQ ID NO: 484765 - DNA, 122 bp, Homo sapiens
gcaacaaacatttactgagtgcctgcaatgtgccaggccccgtcctgggccccgtggctacagccatgatcaagattgttgatgtggaggcagaatgttcaggacaccattggccaggcacg

SEQ ID NO: 484766 - DNA, 122 bp, Homo sapiens
tagaggatcaaatcatttgagcccaggtcaggagttcaaggttacactgagctatgattacaccactgtactctggcctaggtgacagggtgagaccctgtctctgaaaaataaaatataaa

SEQ ID NO: 484767 - DNA, 122 bp, Homo sapiens
tggtccattttacagagagccgagtggtccgttttgacagggtgctgattggtgcgtttacaatccctgagctagattgtattttttgtacagacaaggtttcaccatgttggccaggatgg

SEQ ID NO: 484768 - DNA, 122 bp, Homo sapiens
tctgaaagatgtaactgaataggtagcttgaaattgagtctggagaaatgtctatatttacaggaggtatagtagaaggatatgagcctagcttaaatgatagagaaaatttagagaaacct

SEQ ID NO: 484769 - DNA, 122 bp, Homo sapiens
tgttccagcctctgcctgttacccagttccaaagtcacttccacatgtcgtgtatctttacagcagtgccccactctctgtggtagcagtttactgtgttagtctgttctcacagtgctata

SEQ ID NO: 484770 - DNA, 122 bp, Homo sapiens
acgcagatgggcaggtcctgggactccgaccccacagtggcatctgggattgagtgtttacagctcctgcagccccagtgggagtgtgttacaatgtgttctttcagcttagccgtctgcag

SEQ ID NO: 484771 - DNA, 122 bp, Homo sapiens
agactccatctgttccaaaaaataaataaataaaagggccagcattgtggcatgtgcctgcagtcctagctactcagaggctgttgcaggaggatcacttgagcccaagagttcaaggctgc

SEQ ID NO: 484772 - DNA, 122 bp, Homo sapiens
gggtggcaaaggaacatacatcttgcttttttgtttataatttttaaattatataatttacagcaaatgttttacatcaagaagtaaatgagtatgtttattgtgaatttaaaagaaaatca

SEQ ID NO: 484773 - DNA, 122 bp, Homo sapiens
tttacagatggctctgcatgatctgcaggcaccacctgatagtggacagctgcagcactacagcccctgtctagggcattcctgtaggacagtggcaaggcaaaatcttctcagtgggcaga

SEQ ID NO: 484774 - DNA, 122 bp, Homo sapiens
atgattctgtattaattagctagatgattgtgcatctctgagtcgtaattttgttatctacaagcagtactactaggtggagctgacacaatgtgtattgaatgcctattaattaaaatggt

SEQ ID NO: 484775 - DNA, 122 bp, Homo sapiens
tagggtacatttgctttgattctaagcccatgcagtagtgtagtctccatatgatttcttcagctataaacagtgtcagtgatttcctcagtggcttagggtgtggttgttagtgaggctat

SEQ ID NO: 484776 - DNA, 122 bp, Homo sapiens
aatggttttcttttctctacctacatcctcaccaacccttattttttatctttttgacaacagctattctagcaggtgggaggtaatctctcactgtgattttaatttgtatttccctgatg

SEQ ID NO: 484777 - DNA, 122 bp, Homo sapiens
aggtgaatgtatgtatgcatttctgttggaaatatacctaaaaatggaattgtcaggtaacaggatatgtatgtatttggtctaaatagataatgctgaacagatcttcaaagtatttgtac

SEQ ID NO: 484778 - DNA, 122 bp, Homo sapiens
atctagaagatgaggaagatataacacttacaagatggacagggatgataattgggcctacaagaatagtttatgaaaactgaggggagtggctggcaagatggctgaataggaacagttcc

SEQ ID NO: 484779 - DNA, 122 bp, Homo sapiens
tataaattgttcagtagaatatcaatacatgagcatgaggaaaatggaaggacatatctacaggtgttaacatgacaaatatgagacatggggtgctgatgttataaaagtttgtaggggaa

SEQ ID NO: 484780 - DNA, 122 bp, Homo sapiens
gtgctagggaaagaaggtttgggcaataatgacaactcaggtaatacagaaaaacgattacagtcataaatgacagagaaggaaaggcttttattcataaaggatatctaggtgatagagat

SEQ ID NO: 484781 - DNA, 122 bp, Homo sapiens
ttagaacttaggctgtgtctccagatatcaaaagtttgatcgagtttcatattggttttacagccctgatggactttttgtcaagttgattgtgttatatagacagagtgattttgttttta

SEQ ID NO: 484782 - DNA, 122 bp, Homo sapiens
tggatcactgtgggcatgatgggccagatagagaacagggaagtgactcagaggcccttacagccatggagtaacaaggcaagggatgtcatcagagaggggccaccaagctatgactaaac

SEQ ID NO: 484783 - DNA, 122 bp, Homo sapiens
gtcttgaactcctggctgccagtgattcttctgccttgccttcccaaggtgctgggattacaggcctgagccaccactttgcatggctggtttcatttttaaataatgtcagcagggtaggc

SEQ ID NO: 484784 - DNA, 122 bp, Homo sapiens
aagtctataagatacaaaatgttggccaaatagtgagttgctgtcttctctgtgctcttacagcactctgttttgtatggaacttggagattggcagtacagtaatccacatgcggagaggt

SEQ ID NO: 484785 - DNA, 122 bp, Homo sapiens
aaaaaggaagaaacccaggtgatcttctgtttggtacaaacagcagatgagtaatatgtacagcactttttggcaggggcaggctacccactatggaagctgcagcaacccagctgggagaa

SEQ ID NO: 484786 - DNA, 122 bp, Homo sapiens
agccataaaattatgtagagaaagggggggattggtgacgtgtttaagtctaggctcttacaccagctgagcatgacttagctactctagagtgacttctgctctttaggccatggtaatga

SEQ ID NO: 484787 - DNA, 122 bp, Homo sapiens
ggataaacagggtgaagtaagaagttttattttaggtacaaggagagctgaacacactcacagccagcagaagagacactgaagattcaagaatagagacatgaaggagacaggaggcaaca

SEQ ID NO: 484788 - DNA, 122 bp, Homo sapiens
gtctcaaactcctggcctccaatgatctgcctgccttggcctcccaaagtgctgggattacaggcatgaaccactgtgcccagctgactgtttatatttaggttatgtattccttttttttt

SEQ ID NO: 484789 - DNA, 122 bp, Homo sapiens
agggctttccagagggaactgaggaaggtggctgagggagagagagagggagagaaatcccatctcccattagctgaatacagccagggtgagggccctgccatgtggagcagagcagggaa

SEQ ID NO: 484790 - DNA, 122 bp, Homo sapiens
ttacatcccccttttacaggtaaggaaactgagccacagaaaagtaaaataatttgcctacagtcattaagtggtagagtcaggattcaaacccttacagtctggctacaagagcctgtgtt

SEQ ID NO: 484791 - DNA, 122 bp, Homo sapiens
catgcctggcctcattcattttttacagtcccaaagcccaccacagtaacttatgactaacagcacttgagaaagtttgctgagtgaacagatgcctgtgtgagagtagccctaatcctgtg

SEQ ID NO: 484792 - DNA, 122 bp, Homo sapiens
tggggctcgtggtctcactggcttcctgagtgaagctgcagaccttcgcggtaagtgttacagctcataaaggcagtgtggacccagagtgaacactagcaagatttattgcaaagagcgaa

SEQ ID NO: 484793 - DNA, 122 bp, Homo sapiens
atggaatgagaaagagagggaacaaggatattgtcattgatgaagtatcatataaggatacactctatgcatcctggaagcagggacctgaccatactgatcactagtgtgtaacttgggat

SEQ ID NO: 484794 - DNA, 122 bp, Homo sapiens
ttaaaaattattaaaaatactattgattattaaaagcaaaaaaatgaattatgaagtttacagcatatgtagaaataaaatatatgacaaaacacaaatattgaggggaggtggtttgaatg

SEQ ID NO: 484795 - DNA, 122 bp, Homo sapiens
aacctattccagtgaagccagtcagcagtgaatgtggggcaagtgcatgcggctggtctacagctcccattgcctggtgaccaaggagcatcctgaagtttcagagaagagactgtgtgaca

SEQ ID NO: 484796 - DNA, 122 bp, Homo sapiens
gtagaaggtgaccagatggctggaggactcagggcagtgaacattctccaaaggaaaatacaggctttaggcagtcatgggtgtttcagcctggaatactgaagtatgggccagatgctctg

SEQ ID NO: 484797 - DNA, 122 bp, Homo sapiens
gcaaagttttaaatgaatagatgatgatgatacagtcatgcgtcacataaccacagcatacactcacacacatctagggtaagtagtatggccttttgcttctaggcctgaactgtaagttg

SEQ ID NO: 484798 - DNA, 122 bp, Homo sapiens
tgagagtggttctgatagtttacttgctggcccaagaagtccagggctccattggaagtacagtctagggaaagttgagaagctagaaactgtaaggttcaatataacaaaagaactcatag

SEQ ID NO: 484799 - DNA, 122 bp, Homo sapiens
tatatgctaatttaataaatggtaagaatggcattttaatttggggaaaaagatagattacaggacaagtagtcatattcctatgaagaagaaaatatatgtgggaccctgaacctgttagg

SEQ ID NO: 484800 - DNA, 122 bp, Homo sapiens
gccaaaagaacaaagctgaaggcatcatgctatgtgactttaaactatactacaaggctacagtaaccaaaacagcatggtactggtaccaaaacaaatatatagaaccatggaacagaaca

SEQ ID NO: 484801 - DNA, 122 bp, Homo sapiens
cttatctcttccatcatatgaatccacatgcctggattataattattgaatgcctacttacaggacttaagatactctaacttaaggcttacatgaaatgtgggctttctaaactagaggat

SEQ ID NO: 484802 - DNA, 122 bp, Homo sapiens
agcctttgaaacttgaagatcacaaatgtatcagcttaaaaaaccacatatattattttacagtttctgtggtttaggagtctgggcatagctttgctatatcctttctttaggcttacaag

SEQ ID NO: 484803 - DNA, 122 bp, Homo sapiens
tcaattaatctttactattactatggtcttgtgggaaagatgtgattaaggaagcaactacagtaatgtgttgtaagtactctgtcaggggaatttccaaatgtggtggaaatgcaatgcaa

SEQ ID NO: 484804 - DNA, 122 bp, Homo sapiens
ggcatgtctttgtaaacatgggcagaacagaagagctcggcttggcctgaactcctcatacacttaagggtttgagatttgtattttggtgtcatctacaggcactgtacatagtttcttca

SEQ ID NO: 484805 - DNA, 122 bp, Homo sapiens
tatgggctagacatttgtttctttattcagtaaacatttattgagtacctactatataaacagcatttaacatacttcccagcattttgaaaagatgggtagcagtctctacttctgcccct

SEQ ID NO: 484806 - DNA, 122 bp, Homo sapiens
tgttcatctggccgcccttgttgagtgttctttggaattgtcgttttttgagcacaactacagcattttagactgcatgaaaccatgactgactgagagtcactctctgggtagatgatagg

SEQ ID NO: 484807 - DNA, 122 bp, Homo sapiens
gaacccacagatatgcagataagcacctggccatgggccaggatccatattcacactctacagccacagtgactgctgccataaccatggggcaattccagatctgacaatggccacacagg

SEQ ID NO: 484808 - DNA, 122 bp, Homo sapiens
acctaagagtgaagacaaagcaggaaaaccaaaagtaatcttgctatgctccagaacttacactgcctattaggcagagcagcctgacaccaggaagggtcaggaggtctgagagagacctc

SEQ ID NO: 484809 - DNA, 122 bp, Homo sapiens
gctgcttctgctaaaggatgtctgtcttagttaattgagtgttgctataaatgaattctacaggctgggtacttgatttttaaaaaaggtttatttggctcacaattctgatggctgggaag

SEQ ID NO: 484810 - DNA, 122 bp, Homo sapiens
cacagccatgcccattcatttacatattgtctatggctgtttttgtgctccacgatggcacagtcaagtggctgcaacagggactgtatgtcctgcaaagcctgaaatattttccaactggt

SEQ ID NO: 484811 - DNA, 122 bp, Homo sapiens
aagtgtcagtttgcctgcaatcgcccccgctatgtattcctgtcccagagtaatcattaacagcactcctgttagtggcagcaaatttgtatgggtctgcagcaacctcagctctcgcctcc

SEQ ID NO: 484812 - DNA, 122 bp, Homo sapiens
ttcaggtgtatatttttaaatttattcatcttaacctgactaccatattctcttattttacagcaatgaagttggagcagaggctgaaaacacaggctgctgaagttttttggaatgctggt

SEQ ID NO: 484813 - DNA, 122 bp, Homo sapiens
attggccagcaaattagtagaaacctactaaagtggaagtttgggctgcaggaacatctacagctgacaagttaggaatctcctactgcttgctgcagctagaaactgacagataacttctg

SEQ ID NO: 484814 - DNA, 122 bp, Homo sapiens
tttgcaaatactttttaagttcttaatatatcctgggcactgttttaggttctagagctacagcagtgaacaaagcagacaagaatctctacctttgtggtgcttacatgctagagagggag

SEQ ID NO: 484815 - DNA, 122 bp, Homo sapiens
cagggtagtagcagtggaggtggtaaacactggtcagattctgcatatattttgaaactacagtcagtaaggctttctgatgaattcaaaatagggtggagagaaggtgatagaaggaggag

SEQ ID NO: 484816 - DNA, 122 bp, Homo sapiens
tggatgagaacgtgtgagtgtgttgagtgtgtatgtgagtgtgcctgagagaacaaactacagcagagacaaaatttgaacaagtgttaaattcaggtgtagagtaccttctacttttcttt

SEQ ID NO: 484817 - DNA, 122 bp, Homo sapiens
tgccaaatacctgtattcccattgtatctaggaagtaactagcttgtttcttttattttacaggctcataagtggaaaggacttgcattgtctcagatgagactttggactgtggacttttg

SEQ ID NO: 484818 - DNA, 122 bp, Homo sapiens
ggcttttgaggagctcctaaatctgttcttttccagtgccaataaggctactagtttttacagctactgtagttgcaaacctggtgattttcaaggttactacagagttggggagataagaa

SEQ ID NO: 484819 - DNA, 122 bp, Homo sapiens
acttaatttactgaagagcaaggaccatattaagttcattcttttattcttactagtgtacagcacattttaagaaggctgactccaggccaagatcctatgtatgatctttcagacctacc

SEQ ID NO: 484820 - DNA, 122 bp, Homo sapiens
catatgatgtacacatgtatttaggaggttatcccttaatcttttgaatgttaccttttacaggctatcacattatgtgtggtttttttcagaagtggtttgaaattttatagtctgatctt

SEQ ID NO: 484821 - DNA, 122 bp, Homo sapiens
gaaaggcagttttaccaggcctcaagctagacagatttggcaacctctgtatttgggttacagtcaacctatttggatacttggcaaaagattcttgctgtcagcatataaaatgtgcttgt

SEQ ID NO: 484822 - DNA, 122 bp, Homo sapiens
gtgttaccaggagctggagtgggaggtaggagaaacaggagatgttggtcaaagggtatacagtttcagttatgcaggaggaatacattctgggggatctaacatatagcctggtaactata

SEQ ID NO: 484823 - DNA, 122 bp, Homo sapiens
caagacttaccaaactcccctgtctccactactctgatggttcatgagaaacaaatgctacagtcataaggatttgcagtgcatctctaggattaggtagaaaaatgaaaaaagctgggaga

SEQ ID NO: 484824 - DNA, 122 bp, Homo sapiens
atttaccaatgcctgtgccctaactgtatctaggaattaattaacctgcttttgattttacaggcttgtaggtggaagagacttgccttgtcttggatgagactttggactgtggacttttg

SEQ ID NO: 484825 - DNA, 122 bp, Homo sapiens
tctggtgggttcatggtcttgctcgcctcaggagtgaagctgcagaccttcgtggtgttacagctcataaaggtggtgtacacccaaagagtgagcagcagcaagatttactgcagagtgag

SEQ ID NO: 484826 - DNA, 122 bp, Homo sapiens
aagcactgaagagggtaagaaagaaagtttagaaatgctaaaactgtcatcccctggcaacagccacatagtgcagagagagaatctgtgcccttgggggagagacagcatagtgattgtgt

SEQ ID NO: 484827 - DNA, 122 bp, Homo sapiens
ctagttatgttaacagagattctttatagaggcaaatttttccttaccaaagatgatttacaggaccacttcaaaatgtggcaaagaaacatattttggagtaaaatatcttgatttccttt

SEQ ID NO: 484828 - DNA, 122 bp, Homo sapiens
aatccattaacgccacggatatggcaggaatgatcctgggacggaaattttttgattatgcagcacatcttgggggagctctctttggaatatggtatgttacttaccctcatgaactgatt

SEQ ID NO: 484829 - DNA, 122 bp, Homo sapiens
gccttggcctcccaaagtgctggtattacaggctcgagccactgtgcctggctgtaactacagctcttgagggctagattaaagcacctgggagttattcagcaggtactggacaattctaa

SEQ ID NO: 484830 - DNA, 122 bp, Homo sapiens
atatcagtaaatatgttgtactcaaacaaaattgttcaaggtggaatagaaataaggtctcagctcttgagagataaggcaaaggaagcacagactgctcatctgaatcttcatatggctga

SEQ ID NO: 484831 - DNA, 122 bp, Homo sapiens
cacacatttgccagagtctgccagcccaaccgagaggtcaggagcaaagatagccttttacaggaggccatattgggcttagatgctgagccctgggaccacagccttgctccggcattgtc

SEQ ID NO: 484832 - DNA, 122 bp, Homo sapiens
caggatcattataatgggcctgcacaaccatgaaaagttaggactacttgtactattttacaggcaatgctaagccaatgggaggagtggaaagatcatctgaggaaaatagctgtgctggt

SEQ ID NO: 484833 - DNA, 122 bp, Homo sapiens
gttttaaaagcataaagtactttgtatatatcatggacaaaggtaaacattttaaagttacagtccaaagcatatttggttatggaattctgtatgggatagctcttgttgaacaagtttct

SEQ ID NO: 484834 - DNA, 122 bp, Homo sapiens
gaaagcagaatcagagggagatgagctacatcgatggcccagcactctagcaagtacctacagctgttgtgctcaggtgttgggaagataatcagaagttccacttgtcttagagcccaatg

SEQ ID NO: 484835 - DNA, 122 bp, Homo sapiens
ttgcaagaagggaacaacgactgagtaggggtacctctttatgctggaacattctgtttacaggagaaaaacaaaacctggtctgctctaggatctttgtgtttccttgaagttttagttta

SEQ ID NO: 484836 - DNA, 122 bp, Homo sapiens
tgtatgttacctctgaattaaatgttcctggcaagtgacttaattgtgatatgaatattacaatttttgttaagtagaaaccaaagtccaggcacagtggctcacttctgtaatcccagcat

SEQ ID NO: 484837 - DNA, 122 bp, Homo sapiens
ggcagagaaaaaaatgtgaaatatcttttgggagagtgggagaatgcatgaagtatactacagtaatacagtatgattcctgagcatatggtatgatgactggtcagttttaaaaacaggtt

SEQ ID NO: 484838 - DNA, 122 bp, Homo sapiens
gaatccatgaaaaactacgtatttagagaaagagcaggaaccatggcaagtgccatcttacagcactgcatcaaatattgtttcagggctactgattcctcctgaatgctgattatctttta

SEQ ID NO: 484839 - DNA, 122 bp, Homo sapiens
gtcttgaactcctaggctcaagtgatcctcccacctcaaccacccaaagtgttgggattacaggcatgagctgccatgcccagcctgttacatttttaaatgaggcactaggtcgggcatgg

SEQ ID NO: 484840 - DNA, 122 bp, Homo sapiens
actgctctcagaaagggaaggatggtttttctggtgctgctactaatagaaaagcacatacagcatgcatgtctaaggcagtctcatgtaatatagtagtaccttggctgggcacggtggct

SEQ ID NO: 484841 - DNA, 122 bp, Homo sapiens
atttgatataagatctgctctcactcttatacatatggatatattagcaaaactggattacagcccagtgtaatcaggcagggaacctgtctgaaccatatagtggaactgcaatgaaaagc

SEQ ID NO: 484842 - DNA, 122 bp, Homo sapiens
cacattctttagttcttaaagtgataaacacagctaagctgaagccctacctgggtcctacagcactgataatgtagctaagatgaagccctgcctgggtcccatagcagtgataacgcagc

SEQ ID NO: 484843 - DNA, 122 bp, Homo sapiens
agtcacacaaaacacaaaaaggcttcacaaaggaacagggccagaggaactgatgtcctacagcagtgggcttcaaccagtcttgaagggtacaatggacctggatggacagtaagataaat

SEQ ID NO: 484844 - DNA, 122 bp, Homo sapiens
tatcaatgggtaatttataaagaaaactggtataattggctaacagttctgcaggctttacaggaagcatggtgctggcatctgcttggtttctgggaggcctcagaaaacttacaatcatg

SEQ ID NO: 484845 - DNA, 122 bp, Homo sapiens
tttttgtgtgttttgaaaataagatagaatctttgcctagagctgaaagtgcaggagttacagcatgttgtctgaatagttgtactcaacctctgggctagaacaagacaggatgacgacta

SEQ ID NO: 484846 - DNA, 122 bp, Homo sapiens
tttttttttccctgaaagtttacaggatcttttctttatctctaatgttctgaaattttacagtaatgtatcataatgtaggtcttttttgatacatcctgggtacttgggctcttttaatt

SEQ ID NO: 484847 - DNA, 122 bp, Homo sapiens
agcatttacgttctctccatcagaggcacctgtgccagacttgcaaggtgggatgggatacaggctgctgcaagaacagtccccaaggacacagaggaggttctggggcccaggcattggct

SEQ ID NO: 484848 - DNA, 122 bp, Homo sapiens
cctggcatcacagcgggtctttgtatggtgacagcacaggcctaagggaaaggggatttacaccacatggtttatgtagggtgcaggccaagcaagttcacaagaggctggtgcaggcccct

SEQ ID NO: 484849 - DNA, 122 bp, Homo sapiens
tagtgaaaagaggtttaattgactcagttctgcatggctggagaggtctcaagaaacttacaatcatggcagaagggaccttttcacagggctttaggagagagaatgagtgcaggcagggg

SEQ ID NO: 484850 - DNA, 122 bp, Homo sapiens
agaaggaagggagggagggaagaagcctcagaaaggttaagtaacatgttcaattgcatacagccaataactggcagagctgacaaagaccctagagcttctcaaccccttcacctgggaaa

SEQ ID NO: 484851 - DNA, 122 bp, Homo sapiens
agccatggctaaaagggtccaaggcatagcttaggccatgacttcagagggtgcaagccccaagccttggcagtttccacatggtgttgaacctgagggtgcacagaagtcaagaattgagg

SEQ ID NO: 484852 - DNA, 122 bp, Homo sapiens
agaatgaatgagggcctcattttaacttaattacccctttaaaggccctatgtccaaatacagtcacattctgagatactgggtgctagggcttcaacatatggatgttgggtgtggggaca

SEQ ID NO: 484853 - DNA, 122 bp, Homo sapiens
tcttatgttttgttttccattgtcagtaaactttttttatcttaagctgtttgtagcttacagcaattaggtaaagtatacttttgtgagcaaaattaaaacatttacctttttctgtatct

SEQ ID NO: 484854 - DNA, 122 bp, Homo sapiens
ccaagggccttccataaaagaacaacaaaatcacaatgatttatttctatggatgttttacagtctctccaatgagtgagtcatgtctagagggccactattacacaaggagggatggaagc

SEQ ID NO: 484855 - DNA, 122 bp, Homo sapiens
agagcaataggatggggaagattccaaccattggacaacaacctaaacattcttctattacagcatcagctctgattgccttagatttttgaggaaataccttttgcctcattaaactgagg

SEQ ID NO: 484856 - DNA, 122 bp, Homo sapiens
aaagtaaacagaacaataaaatctgagtttagggaataaaaattctagcatttagagctacaataccaatccaaaggtaaatatcactctggagggcacaaaggacaataaataattgtatg

SEQ ID NO: 484857 - DNA, 122 bp, Homo sapiens
agaaggattgtggactctgcatggtcaagtgtgcatccaagccattggaataacagacaacagctcacatgcattgagcacatgctatctgctaagcatggttgtaagcacttaataaataa

SEQ ID NO: 484858 - DNA, 122 bp, Homo sapiens
agagagaggaattatccataaatatgtttttttcaatacaatgtagtaagtatagtgatacaggcattcaaagggtacaatgagatcccagaattgggggctctagctgagtttttgggagt

SEQ ID NO: 484859 - DNA, 122 bp, Homo sapiens
gaacacacttaacacatccactgacatacaataatgtcttatgtgatgcagagtggaatacagtccagaatggtagagttgagtttaatggacagatatttttggctgggcatggcagctca

SEQ ID NO: 484860 - DNA, 122 bp, Homo sapiens
gtctcaaattcttggcctcaagcaatccacctgccttagcctcccaaattgctgggattacaggcatgagccactgtgcccagcccaagtagactgttttaaaaaattgttttatgtctatt

SEQ ID NO: 484861 - DNA, 122 bp, Homo sapiens
aaggcagtgctgggtcacatgatcccttaaaaacaatcacataagttaacctatttattacaggccagtaatgtttgaaatggagcctctactagtcttccaattccttcagtcttctgata

SEQ ID NO: 484862 - DNA, 122 bp, Homo sapiens
ggagctgacagaactggttctccctccatcaacaagatttgatgaagagagataggcttacagtcacagagaattggggagagcctggaagatacataccaaagatcacagcccccacctga

SEQ ID NO: 484863 - DNA, 122 bp, Homo sapiens
ctcttgccttcctccgcttaccagagtggtgatacagaggtaatcactgtaactggtttacaattaatggatttataatcacataattgtatgtacctttggaaaataatgtcatgtaggtt

SEQ ID NO: 484864 - DNA, 122 bp, Homo sapiens
ttatggatgattgttgctgttctttctcttaaaaacctgaaaactgcaacaagaattttacaatcacaagcaaacagcaggtactcagtctttgaatctggagagggagaaaaccaaccaag

SEQ ID NO: 484865 - DNA, 122 bp, Homo sapiens
ccacccagctctgacctcatcacttaacctgtaagtaaggtgatcccccaaacattgttacaggacttacatggaatgtgtgcagacaccaatctgagcacacccaatacatgttagggttt

SEQ ID NO: 484866 - DNA, 122 bp, Homo sapiens
tttctttttataaagataggcctttcaagtctttggtgataagaaagagttctacaattacagtccaatgggaataggaggagcttcactcaagtgtgcacatgcacacttctgctttggtt

SEQ ID NO: 484867 - DNA, 122 bp, Homo sapiens
attatgacaactatgatgtcacaaggccgtaggaattttgtcaactccattataaacttacaggaccactgtcacatatgtggtccactgttgaataaacactgttaagtaacacctaactg

SEQ ID NO: 484868 - DNA, 122 bp, Homo sapiens
ccccattattttttggctcaagtgggcccagtacagctcaatcaaccactctggaagttacaagacataaaccttggcaatgtctatgtggtactaattctgcagacaggtggaatacaaga

SEQ ID NO: 484869 - DNA, 122 bp, Homo sapiens
gacattgattaaagggtacaaatattcagttatcagacctaatgttcagcattgtgactacagttaataataatgtattgttagccaggcccagtggtgcacacctgtagtcccagctactc

SEQ ID NO: 484870 - DNA, 122 bp, Homo sapiens
acacagcagatggcagaggtgggcccagatggatgcctgcacatgcagtgggttgcattacaggagaggaactctgaacttggagaatctgccacttttgtaataagcagaagcaagcctgc

SEQ ID NO: 484871 - DNA, 122 bp, Homo sapiens
gggcacttgatatctcttacttagggatttagaaagtttttatgatgcagatcttacttacaaacagctacttttcagtaaaggaacagaaggacttgggatttctcatgctacatcaaaca

SEQ ID NO: 484872 - DNA, 122 bp, Homo sapiens
ggcttccaactcttgacctcaagcgatcctcctgtcttgcttctcaatgtgttgggattacaggtgtgagccacagtgcccaaccaagagcttgttaatgaagtgttagtagtgtggatccc

SEQ ID NO: 484873 - DNA, 122 bp, Homo sapiens
aagataaagctgttgaactaagaaagctttccaaatattaataacattcgttaccatttacaggctgcttgattagtgcctgattaggcacagttacaagcatgttttagatattattctac

SEQ ID NO: 484874 - DNA, 122 bp, Homo sapiens
tatcttatttttctaactaattttagtgtgtgggaaaacactggcaaaatatcatacttacagcatcttgaaaaccaaagagtaccacctggacttggctaatgccatggctgtcgaagtcc

SEQ ID NO: 484875 - DNA, 122 bp, Homo sapiens
gtcttgaagtcctgggctccagtgatcctcctgcctcagcctcccaaagtgctgggattacaggcttgagccaccatgcctggcccatcacactttttaaaccagaaatggtgtgaagacat

SEQ ID NO: 484876 - DNA, 122 bp, Homo sapiens
gtcttgaattcctgggcttaagcgatcctcccaccttggccccctgatgtgctaggattacaggcctgagccatggcacctggactatgagattttatctgttttcatcaactaagtagtaa

SEQ ID NO: 484877 - DNA, 122 bp, Homo sapiens
aggggaggtttgggatgtcacaggctgtcaggaagccgagtgaccaagataatgactttacaagtatcaagcctggcaaatagagcaatgagtacttcactacaaaatggcacaagttccaa

SEQ ID NO: 484878 - DNA, 122 bp, Homo sapiens
tcttgaactcctgggcttaagcaatcctcccgccttggcctacccaaattgttgggattacagccatgagccaccacacccagtctgggactgattttgttgaaagacatgagatagaaaga

SEQ ID NO: 484879 - DNA, 122 bp, Homo sapiens
catcttaaaaatcaataatccaattactctactgctgataatatcagtttctcccatctacagttattctttatagactcaagattgtgaggaaaagcaagtactgatgagttcaactcttt

SEQ ID NO: 484880 - DNA, 122 bp, Homo sapiens
gtctcaaactcttgggctcaagtgatcctcctgccttggctttccaaaataccgagattacaggcatgaaccactgtacatagtctcagacctttgctatggatgcatccaacccactctca

SEQ ID NO: 484881 - DNA, 122 bp, Homo sapiens
tccaaaaaaaaaaaaaaaaaaaaaacacacacagagataaatatctaaggattctaactacagttttggatataagaattaaacctgtggttgatgtggtggctcataactcatacctgtaa

SEQ ID NO: 484882 - DNA, 122 bp, Homo sapiens
gcagagcaggtggaagaagaggagtagttttcctacttctctgtacactatccttgcttacacttcccaaccaaataaactgattcaaaacactaaaggaggaaggaagttaagagggatgt

SEQ ID NO: 484883 - DNA, 122 bp, Homo sapiens
aactgagaggaaatttagtttcctcagtcaccactcctccaaactcctgcgtgggtgatacaagacttgctgtcatcttgaggcagaaggggttaggggatttccccattgaacctgatagc

SEQ ID NO: 484884 - DNA, 122 bp, Homo sapiens
tggtaattctcacaatattccaaactttttctttactgttatatttgttacagtgatctacagtcagtgtgacctttgatggtgctattgtaattagtggcaccacacactgtgcccataga

SEQ ID NO: 484885 - DNA, 122 bp, Homo sapiens
acaggcccagggcgggagaacctgcccagtaaggagataggggaacaggcatccatttaacagttggttcacttttctgcaggcctgctgtggtatgctggggccccactccagtccctaat

SEQ ID NO: 484886 - DNA, 122 bp, Homo sapiens
gaaatatagattgtttatctggcaatagttcaggaaaaaataagatttaaaatggtattacagtagttcctccttattggtggggatacattctaagcccccagtggatgcctaaaattgct

SEQ ID NO: 484887 - DNA, 122 bp, Homo sapiens
tgtgaggttcatacaagcccacagtactttagctgcccataatgatgggaggaataattacagccactattggtgaaacatttatgtatcagacacttgggtaggtgctcatcatccttgtg

SEQ ID NO: 484888 - DNA, 122 bp, Homo sapiens
gaaagagttactcagcacttcctaggtataggtgatgagagatggtattcatttattttacagcttgaagaatctgtaaagaaaatctgaagaaaagagttatctgggctgggcacggtggc

SEQ ID NO: 484889 - DNA, 122 bp, Homo sapiens
actgtttccaactcctgcatcctgctgctctacaggatggaaaatgccatcactgacttacaggaagataatctgactggagtctttctatttgtcatcctgggtttagcattacacacact

SEQ ID NO: 484890 - DNA, 122 bp, Homo sapiens
ggagagaacctggatgcttatcacatttcccaggcattttaaagcataaatgcgtatctacaggaacagctgttcaggctgtgtggaccatgactgtagtgtcctagggcttcccagtaaga

SEQ ID NO: 484891 - DNA, 122 bp, Homo sapiens
gtttcgaactcctgacctcaagtgatctgcccacctcgccctcccaaagttctaggattacaggcatgagccaccatgcccagttttaaatttttaaaagagtattaataaatacatcaatc

SEQ ID NO: 484892 - DNA, 122 bp, Homo sapiens
tggggtttaaatggactgtatggctctctaagtcatatcattgatcctaaaaataaattacaggccacattaataggcagattataccaaggggcatgtagtaactccagcatagatcaggc

SEQ ID NO: 484893 - DNA, 122 bp, Homo sapiens
tacagtatttgctgcctaaatctctgcctcccacctgtccctgtggaaattgtctgcttacagtcctgcagacagaggaccatgaagtagtgtggaaatgaccacctaggttgttgtgactg

SEQ ID NO: 484894 - DNA, 122 bp, Homo sapiens
ccagctgcctagccagaaaccacattctccaggccccatgtcagtgctcaagcctgtttacagccccaaagatgccaagctcatactaggggacaaatgttgtgccaggtacacagcagttt

SEQ ID NO: 484895 - DNA, 122 bp, Homo sapiens
tcaactctgcctgtgctctataaatgaacaacaaatcctagatgtcaacacatctatttacagcatggcttactattttgagcccactgttgggacctactgctcagaggaaagaagaaaaa

SEQ ID NO: 484896 - DNA, 122 bp, Homo sapiens
tggaaagaagatgggtaaaggaaggaggatgaaggaggatatttgctgtgaaacactttacagcagttagaaacatgggaaggatgaacacagagcaacaaggattttttttttttaaacca

SEQ ID NO: 484897 - DNA, 122 bp, Homo sapiens
ccaaactcaggacagaagaagatagcagtggatttgtaaaaatttttagtttataaattacagtcattggggaaacactagtaaggtcatgtgatcttttggaccaggattttctctctgtc

SEQ ID NO: 484898 - DNA, 122 bp, Homo sapiens
ggtctcaaacttctaggcttaagccatcctcctgcctcagcctcccaagtgctggtactacaggcatgagccactgcacctggctgagaaatacacaattttaaaaaatatctggccgggca

SEQ ID NO: 484899 - DNA, 122 bp, Homo sapiens
attgggagtcttaatacatcttgcctagaaggaaagcagactagagcaaggctgaagctacagctggtaaaccagcagcctccactcagcttagctctacagggggatttgggtcatttctg

SEQ ID NO: 484900 - DNA, 122 bp, Homo sapiens
cttggtgtagctcagtctccagggagacactgggtgatgaggctggggtgtcagtttccacagcagcaatcagtgtgcaggtctgttgccagggagacaggcctttcagaaagtgttccact

SEQ ID NO: 484901 - DNA, 122 bp, Homo sapiens
tgtgagctgctctagcaaattttcaaacttgaggaggggatagaggccgtttctgatttacaggcagaagcttggaagcacaggtgacagtctggacttgcctctggcaactgaagtagggg

SEQ ID NO: 484902 - DNA, 122 bp, Homo sapiens
caaagcaagtattttccatttgttctatgtgtgggtgacacacctgggcttttgccgccacacctcagtcactggtggcttcatgaccttgggtaagtggcttcctgtacctgggcagcaag

SEQ ID NO: 484903 - DNA, 122 bp, Homo sapiens
tcgcctttcatggatggagaaaccgagcttggagaagcaatgtgtttacccaggaacttacagctaaaatgcagcagtactgggacaggagcctgcttggttgaaatcccagtttcaacagt

SEQ ID NO: 484904 - DNA, 122 bp, Homo sapiens
gggtggagtcaggaccaaatttcaggcccagactcctggctaccagcatgtgccaaagtacagcagctggacctccctgaggtgccaaatgattttaggtggaatgtggaaacattttaata

SEQ ID NO: 484905 - DNA, 122 bp, Homo sapiens
gatgacgccaggtcctgggaaaatgatactgtcttggtccagcctccacctctgcatctccaggactgatgttccccctgttaaaggagctggtgagcagtgagattacagtctagatgcag

SEQ ID NO: 484906 - DNA, 122 bp, Homo sapiens
ggaccactcgggaggtctcttgtgcctggcattgcccacttcagcccagtcacgtgtttacagcaaccagagtccctgcaaaggtgtggctggctgtggtcagggcctactagcaccatcac

SEQ ID NO: 484907 - DNA, 122 bp, Homo sapiens
ccagcagtggcacatcacgtctccgtgattcaggtatgaaataagggcaagaagatcttacagcccataaggggtggctgggcctgacctggtgcaggcatttaagaccctgaccttggcag

SEQ ID NO: 484908 - DNA, 122 bp, Homo sapiens
ttgtacatgatttagtccctgggctaagtcccaagtgtgaggccagggcaggttgtggtacaggccccacaggcagctctcatgaatgcagcccagttcctggcacacagcaagggctcagt

SEQ ID NO: 484909 - DNA, 122 bp, Homo sapiens
ttaaaaaaaaaaaaaaaaaaaaaaaaggaaaaaagctagaaacaacccaaaggtcatcaacagtacaatggacacttaaattgtattatagtcaaacaatggcatgctgcacagcaatgaga

SEQ ID NO: 484910 - DNA, 122 bp, Homo sapiens
ctaagggccatcttgaaggctgggtgccataagtttctaggaaagagtccattccataaacagttttaggtgagaagcatgtgaaacagcaacagattcaaaggatattggaaagtgcctgt

SEQ ID NO: 484911 - DNA, 122 bp, Homo sapiens
gtaagaaagctttacagactgatggaagacagggcatgtgtgtgaggaaacatggcattacaggacctggaagaagaagatgatgcctagaaggagtgaggaaaaaacaaggctttccagtc

SEQ ID NO: 484912 - DNA, 122 bp, Homo sapiens
cagtaattttcaagaaatttaatctgaacatgaaagcaaaagaaaaaatagcttgaattacagcacatgagacttaggttagacttaagtgaaaacttaattgacctagttaggagtctcta

SEQ ID NO: 484913 - DNA, 122 bp, Homo sapiens
gatacccagggaatttcctctcacccagtttccaaaacttttccaaaccaaatgcacttacacctggtaatgtgtaatgccagtatgcctaggagaactgggtctctgtccagaaatccttc

SEQ ID NO: 484914 - DNA, 122 bp, Homo sapiens
catggacatagttggaccacattgggctaagaggctgagatacctcaggaattagggttacagaccctcaaaccagagggttaactttgggggaaatgagtattttgctcttttatcaccaa

SEQ ID NO: 484915 - DNA, 122 bp, Homo sapiens
aaagagaaaaggaaataaaaaatatgaaaggcaaacaaaatgggaacatggatattactacagcactaaaatgtattatatttgatactgtcttgatttgtatgtgtaaatcatttcctgtt

SEQ ID NO: 484916 - DNA, 122 bp, Homo sapiens
ttgagggtttaacactgggctgtgccccacctttgagttgagtttgagcaaatgtgattacagccacactacccagccagggaagagatggggagacaaagatttcctaagcacactttgga

SEQ ID NO: 484917 - DNA, 122 bp, Homo sapiens
actggtatctgagagttgatgagaagtggcaaaggctaaaagcattctagtccaaatgtacagcacatgcaaaggtcctgaggtggcagagcaagtggcataattaaagaacagaaacaagg

SEQ ID NO: 484918 - DNA, 122 bp, Homo sapiens
aatcagtctgatattggtctgttgaactgcctgtgtacaatataagcattaaagcacttacaattgttgcctggcaaggttgaaagattggagtgaaatattggcaatcatagaaggattaa

SEQ ID NO: 484919 - DNA, 122 bp, Homo sapiens
caggccttgtcctaatttgaattttaatcttaatttttacaaaaccctataagggcagtacagtacattatctctatcaatggggaaacctcagttcagggtcttgcctaagtctgcttcca

SEQ ID NO: 484920 - DNA, 122 bp, Homo sapiens
gtcttgatctcttggcttcaagcaatcctccagccttagactctcaaagtgctgggattacaggcatgagccactgtgcctgaccaagaaatgtctttgtaatcatcttgtgttcacactag

SEQ ID NO: 484921 - DNA, 122 bp, Homo sapiens
ctcctgggctcaagcaatccttctgccttgacctcccaaagtctcaaagtgttgggattacaggcatgagccactgcaccaccctaaatgcttttatttagtgagagccataacatcatatt

SEQ ID NO: 484922 - DNA, 122 bp, Homo sapiens
cagtcctttaacttctcataagactaaaacagtaacctttttaatataactccagatttacaggagtgtgaatattactcacagcttattaccagagtgccaggggctgcatgctttgtata

SEQ ID NO: 484923 - DNA, 122 bp, Homo sapiens
cagtgatgatggtattagtttcagactcagaaatggcccaatccccagtggactcagctacagccccatttggtcttggtcatgctacaagaaccatctgccaaggtacctggaggagtcac

SEQ ID NO: 484924 - DNA, 122 bp, Homo sapiens
aggtaccaatttctgtacctcaattgcatctaggaagtaaataacttgcttttgattttacaggctcacaggtggaaggggcttgtcttgtctcaaatgagactttgaacttggacttttgc

SEQ ID NO: 484925 - DNA, 122 bp, Homo sapiens
gctgaagcatctggaagtgcagagcttttactggaagggttggatgggcttttttgactacactacatgaagtgcacatccagtctcagagggatggagcacaggtaagggcccttcaggca

SEQ ID NO: 484926 - DNA, 122 bp, Homo sapiens
aaatggcaaaaagaagacctggtgcttgtgcctacacagcactgacaagtggtctgattacaggcaaggctctcaacctttttgggcctcagtgacctcatttgttcagtaatgaggggctt

SEQ ID NO: 484927 - DNA, 122 bp, Homo sapiens
accaggaatggaaccctacagtagtatggaggagatgaacttaggccatcttttcctgtacagcagtccagagcatggaggatgaacctacccaggccttcatgttgactccaccccaagag

SEQ ID NO: 484928 - DNA, 122 bp, Homo sapiens
gtctccaattcctgacttcaggtgatccgcccgcctcggcctcccaaagtgctgggattacaggcaggagccactgcccctgatcagagaggataactttactctttgatacacgatagtga

SEQ ID NO: 484929 - DNA, 122 bp, Homo sapiens
gtgtgtctaggaatcttcttaagtcataggaatgtttgactatattggaaaatgacattacagtcagtttatttgagtatgtccactctggatcctgtaggacaattagctgcttgatcatt

SEQ ID NO: 484930 - DNA, 122 bp, Homo sapiens
ttctacaacaacctttactgtcatctgttgggaaagtgtcatagcaaacatccctatctacagcatctgtcctgtaaatggtatcttttaggtttatataatgtacacaatttgttcaccag

SEQ ID NO: 484931 - DNA, 122 bp, Homo sapiens
gaggctgtggaaagcattttgggctccaatcccatggtagtatctaggcttgagtgtttacagctcctgaggccccagtgggcatgtgttacagtgtgcactttcagttttgccatctgcaa

SEQ ID NO: 484932 - DNA, 122 bp, Homo sapiens
ttttgaggaaggcaagttctgattggtaggtgaagcatggaatttgaaatgtttggtatacagtcatgccctgcataacaatgtttcagtcaatgacagagtgcatttacaggggtggtctc

SEQ ID NO: 484933 - DNA, 122 bp, Homo sapiens
tgagattgggtaatttgtaaagaaaagaaggttaattggttcacagttctgcaggctttacaggaagcatggtgctgacatctgcttggcttctaggtaggcctcaggaagcttacaatcat

SEQ ID NO: 484934 - DNA, 122 bp, Homo sapiens
aatctaacaaagaaacagttggtgagaatgtggggttcaaaagggcaggcacatgatctacagctgtgatggtttagcatttatatggaatatgttctgctacctcagataatgggaataca

SEQ ID NO: 484935 - DNA, 122 bp, Homo sapiens
aagaggactttggaaatgggtaggcgcaaagaaagcccattagcatgcaagatcattccacagctatgctcaggacaacactggtactgttgcattggagtgcagctgtcatgactgactat

SEQ ID NO: 484936 - DNA, 122 bp, Homo sapiens
tgcttaattttcttctttgtctttttaaatttacattaggactatgaagttttaattgaacagccattaacatatatggttatatgttgcatgatgtttcaatcagtgatggactgcatgta

SEQ ID NO: 484937 - DNA, 122 bp, Homo sapiens
ggattaaaaagcaccattgtacaagtgagttttaagggctaacttgaggcatagtaactacaattcagagaatcctgggattgctgtctggaactgttccaagcttgtgcagcctacggccc

SEQ ID NO: 484938 - DNA, 122 bp, Homo sapiens
ttggtgttagacatgcaaaaaacctgaaaagttatctccaaagggcaatcttaggttttacaataatgatgttatctgcagaagtaattgagaaagttgtatatcttgtgacctccagaaga

SEQ ID NO: 484939 - DNA, 122 bp, Homo sapiens
aatgttaggtaggttcccctctgcctcagtttctccatctataaaataaggtgataattacagctactaaggtagttgtgagattagttaatccaggcatagtactggcatatcatttttgt

SEQ ID NO: 484940 - DNA, 122 bp, Homo sapiens
tatttaccgaatttctgtatccccattgtatctgagaagtctaacttgcttttgattttacaggctcataggtggaagggatgtttgaactttaacttttgggttaatgctggaatgagtta

SEQ ID NO: 484941 - DNA, 122 bp, Homo sapiens
ctttgctgagtctacagtgcctactcttcccccaaaggcacagctactcatgagctggtacagcacatgtaggaagagaagattggcacaggatatcatccaaattgaagtgagggaagaac

SEQ ID NO: 484942 - DNA, 122 bp, Homo sapiens
aaggaaaagaacaaattgaagtgacagcaaataacagatgtaaaatctacttaggtagaacagtcagggagagctttggttgagatttaaagaatgagcaaagccaagccagcaaagtgggg

SEQ ID NO: 484943 - DNA, 122 bp, Homo sapiens
aaatgctgatagtgatatggacaacgaagtccagactgaggaagcctcagatggaaattacagacttactgggaattagagcaaaggtcacttttgttatgtgttagcaaagaattctgtgg

SEQ ID NO: 484944 - DNA, 122 bp, Homo sapiens
taaggcccctaaacctgtggagttttcctacatcacaccatgattgcagtattgcttctacagcaggaaaaatgtattctacaaagagtcccacccaaattagctaggcagaagagctggtt

SEQ ID NO: 484945 - DNA, 122 bp, Homo sapiens
tccttgccagactcaaaaaatctcagcaggcaggagtacatgatgctctgtaacttcccacagcccctattggagtatgtggcctgtagtggctgcccagtcagtggtgactaataatgtac

SEQ ID NO: 484946 - DNA, 122 bp, Homo sapiens
aaggatgtaataagtggacccaagaggatgcactcccatttcctaaagctgattcagttacagccaatgacaaatagcatatctttcagtggccaatgctcagaaactgtattagtcagggt

SEQ ID NO: 484947 - DNA, 122 bp, Homo sapiens
aacgagtaggagaagctgcaatgttcaatggaaaaggagtggacctagaaagaaaaacaacaatctaaagcaatggtaaaaccataatgaccccaatggagatagttaggcttggtcaagca

SEQ ID NO: 484948 - DNA, 122 bp, Homo sapiens
gaaaaaagaacaaagctggaggcattatcctacctgacttcaaactacactacaaagctacagtaaccaaaacagcatggtactggtaccaaatagatatatggaccaatggaacagaacag

SEQ ID NO: 484949 - DNA, 122 bp, Homo sapiens
atctcaaaaaaaaaaaaaaagtacagagggggacacctgactcctccatagggctgactacagcactacctcttagaagctgcccttacaaataaagagattagggtaggcagggtagctca

SEQ ID NO: 484950 - DNA, 122 bp, Homo sapiens
atcagttttttccacagaaccgatgcagaaactagtaagtttcctcaagaattgtaactacagtagcctggagaatctgtgcttggatagagtaaagttgatgtaagaaacaagtgcatttg

SEQ ID NO: 484951 - DNA, 122 bp, Homo sapiens
tggagttgctgaaattcctgcagtgaggctccacccggtgagaaggaatgggtcagagtccagcctaaagaggtagtctggtcaccatctgtcagctgctgtgctgcactgtgaggaattcc

SEQ ID NO: 484952 - DNA, 122 bp, Homo sapiens
ttctgagtaaattacccagagctgatttgttttgcctgaaatacagaatcccgatcactacagcagttcaagcaagagttgttataatctgtgcccaatggtaacaatggaaagggaaataa

SEQ ID NO: 484953 - DNA, 122 bp, Homo sapiens
taaaatatctgaatcaaatatgacaaatgcaaacagctgtttgctcaaaggagagaattacagaacctgaggactggcagcaggatggccagcattgctgccataagcaggggtaggtgtgt

SEQ ID NO: 484954 - DNA, 122 bp, Homo sapiens
ttaatgggctcacaattccatgctgtacagaagcatggctgggaggcctcaggaaacttacaatcatggcagaagatgaaagggaagcaagcatgtcttgccatggtggagtaggagagaga

SEQ ID NO: 484955 - DNA, 122 bp, Homo sapiens
aagtataaagtgcagtgaaattgtgctctagcattggcgtcttgcttgcagagcagtgtacaccatactaggtttctagcagctttgggaggaatatgccatgtgtgttctgtgcagtctca

SEQ ID NO: 484956 - DNA, 122 bp, Homo sapiens
tttctcccccaggttacccttaagttacaggagtcccagctgcctgggccagaccagttacagcagtttcaggtggtctgtgagactgaggaagacaaattcctcctgctgtatgccctgct

SEQ ID NO: 484957 - DNA, 122 bp, Homo sapiens
tgaatgccagcttagctgcaatagaatagaggccaggtaaatttctacggttcttgacttcaatccctggcacccagacagcatctctggacccaagcaggacctaggggaattcacagccc

SEQ ID NO: 484958 - DNA, 122 bp, Homo sapiens
gatggtagattttatgtggacatatgggaaatgacaattgctagacatgaggagaaattacagggaatgagcagacatatgggaaatatggtttaaaaagaacaaagagaaagaattgggaa

SEQ ID NO: 484959 - DNA, 122 bp, Homo sapiens
gtaacagtaccataaaagtgacaaattattgctttgggccagaggaaagttattaacttacagctgtttacataactgttgtccaggcccagcttcagatgcagctgtgttggatgtgtggg

SEQ ID NO: 484960 - DNA, 122 bp, Homo sapiens
actgggcttaagtcccctggaagccactgcagctagaggtggaggagtttgcaaaaattacaggaggtgcaacaacaatgagtaccacctctttgactgtaactcttttgactaagtccttt

SEQ ID NO: 484961 - DNA, 122 bp, Homo sapiens
gtctcaaactcctgacctcaagtgatctgcctgcctgagccttccaaagtgctaggactacaggcatgagtcactgcacctggcagaaattctgaatttaaagttattgagttttattgtat

SEQ ID NO: 484962 - DNA, 122 bp, Homo sapiens
tatgatttgtctagtgttccagggccttacctctgctctgtcagactgggtttggatatacaagcagtagatccaaaatggtaaagaatcagtcaggcatggatggatgaaaatagttgaga

SEQ ID NO: 484963 - DNA, 122 bp, Homo sapiens
caccagggaggacctatctttggagagcaccaggagctccgctgccctgtactgacattacagtccactcactgcctagaacttcagaggtcacttctagagaggtaattttcaaaggggag

SEQ ID NO: 484964 - DNA, 122 bp, Homo sapiens
tcatcactctttggagcctgaagtccttcaggaggcctgaatcctctgcagttgtgtctacagtgagaaaccccaagaacttgtaatgaaacaaaatacaactattttatagaagaaaactg

SEQ ID NO: 484965 - DNA, 122 bp, Homo sapiens
aaatagccgtagactctataagcttcttgtttgagctgccctcacagacctgtgggtttacagtcctcacctgagaaactattgtctacttggacaaactctgctgcaggtcaccaataaaa

SEQ ID NO: 484966 - DNA, 122 bp, Homo sapiens
gtctcaaactcctgacatcaagtgatctgcccagctcagcctcccaaagtgctgggattacaggtgtgagccactgtgcttggtcaagggaaggaatattctaaaaaatgtgttactgtggt

SEQ ID NO: 484967 - DNA, 122 bp, Homo sapiens
aaccagaggttaattcagtctgaatctaaaagcctgggagaatcagggcagccaaaagtacagctctcagtctaaggccaagggcctgagagcctggggccactggtgcaagccccagagtc

SEQ ID NO: 484968 - DNA, 122 bp, Homo sapiens
ttgaggcaatgatcagtctatgcttaagaaggcttcagagaacgtagtgtccttgatttacagccagtgtttgatttaaaataaaagacatagatggatggcaggaagaggaatgagagata

SEQ ID NO: 484969 - DNA, 122 bp, Homo sapiens
acaattcagttttttcttccttccagagagacagctgctgaagtttctgtttgtctcttacagccaccagttaatgaatcagcatgtatctgaactacattggcatgctttctgttaacttt

SEQ ID NO: 484970 - DNA, 122 bp, Homo sapiens
gtgggaagggttactgttaaaaatttttgaattgatgtatttgattgaattggccaattacaatagtgcaggtgacagacaatgttttggtctccaagtatagtaaaagtaagtcaatttat

SEQ ID NO: 484971 - DNA, 122 bp, Homo sapiens
attgtatatacggtccacggttgaccaagacattatgtggtgcatgactgcaaccatttacaattcaaggcaggatgaatgaggaactaatggtagtgcagtatgggagagacaagaggagc

SEQ ID NO: 484972 - DNA, 122 bp, Homo sapiens
atctatgatacataaagttacactggcattagggtggcaatagtctatcaaacatctttacagctagcttaaatcccaacttatgagaactaggccagtctctgaagtgatggggcagccag

SEQ ID NO: 484973 - DNA, 122 bp, Homo sapiens
agaatcttaattttcctgttttttagcatccgttggtggttactacacatttaattttcacagcacttccacatgctgcaagggagagactattttcatatggtgaaaccaaggtcctgaag

SEQ ID NO: 484974 - DNA, 122 bp, Homo sapiens
catcattatgtgtcctaaattggtgggttcttggtctcactgacttcaagaatgaagccgcagaccctcacagtgagtgttacagttcttaaagatggtgtgtcctgagtttgttccttctg

SEQ ID NO: 484975 - DNA, 122 bp, Homo sapiens
atttaattcataggataaatctggagcccttcagtcaattcctagacttgatccagtttacagacctagaactccttgaatgtaggggaagccacatgcacttgaggaaggatcgtagttca

SEQ ID NO: 484976 - DNA, 122 bp, Homo sapiens
attaacccatccctggttaaggcatttaatatgggcatgtcttcattgcagattatactacagtcaactgcagtgcctatattgattaaatcctgggctaggatatttcctttgaatggttg

SEQ ID NO: 484977 - DNA, 122 bp, Homo sapiens
agtgagcttcatgatgagaagcttgagagattatatcaggtcaggtcactgggaatattacaggaatttggttttgtagagaataacatgaatctgattttggtcatgcatatggaggtgtc

SEQ ID NO: 484978 - DNA, 122 bp, Homo sapiens
gaaaataagtaaaaccagttatagtctagtcagcatttttgggtccattctcaggttttacagccaagcaagaatgggttgttttgaaggagaccagaaaaagattgagtttatttgtttgt

SEQ ID NO: 484979 - DNA, 122 bp, Homo sapiens
agtacaacagaacaccaggtagacttctaaggattttaagcgtagtccctggctcctgaacagcacctttggatatgcccatggcctaagggaactcaccaaacccaaagggaaagatcggc

SEQ ID NO: 484980 - DNA, 122 bp, Homo sapiens
catggactgttaggaactgggccacacagcaggaggtgagcatcaggtgagcacgcattacagtctgagctctgcctcttgtcaaatcagtagcagcattagattctcatggtagcttgaac

SEQ ID NO: 484981 - DNA, 122 bp, Homo sapiens
agatgtattggaagattaaatgagttatgtatatgagggtttagcacagtatcagacatacagtaaatgcttagtaagtgaatattcaacaaatgctactgaagaatatgtcacatgttgat

SEQ ID NO: 484982 - DNA, 122 bp, Homo sapiens
agcaccttgatctcaaacttccaacctccagaactacaaaacataaacgtctgttgtttacaagccacctggtccatggcatttgttactgcagtgtgactggactgagacacctctcatgt

SEQ ID NO: 484983 - DNA, 122 bp, Homo sapiens
gaacttcaagatattgaaaagataaaccttaaaatgaagaaacccagagaaaggattatacagcagatttgtatagttgaaaagagaatgattgaatctgcagggaaaagaaattatccaga

SEQ ID NO: 484984 - DNA, 122 bp, Homo sapiens
caagcctatagcaatcagaatattactgactagtcaggtcatttgaggatctttagattacaatcatgcctgatgtttcagaatctggatatgtcagagaaggaaatttgactgtgaggtgc

SEQ ID NO: 484985 - DNA, 122 bp, Homo sapiens
gtctcaaactcctggactcaagggatttgccaactttggcctctgaaagtgctgggattacaggcatgagccaccacatctggccaaagttgtttttttgttttgttttgtttgttttgttt

SEQ ID NO: 484986 - DNA, 122 bp, Homo sapiens
cagatctgaattaggactgtatttatggatacttggtggacactttgcagagaacacttacagctattacagtgcaaactgcttgatccctgtaattagaaacaggctgaacattattaggt

SEQ ID NO: 484987 - DNA, 122 bp, Homo sapiens
ccttggtttaaaaaacaatcataccaaggaagtggaaggagctgctgaggcctgttcctacagtcacttaattttctgcaccacctaggaagtatgtcaccattttttagcagctatgccat

SEQ ID NO: 484988 - DNA, 122 bp, Homo sapiens
gtcttgaattcctgacctcaggtgatccacctgccttgttctcccaaagggctgggattacaggcctgagccactgtgcatggctaaatagcctatgtctaaataacacatacgattaaaga

SEQ ID NO: 484989 - DNA, 122 bp, Homo sapiens
ctggaatttatctccgtgatcagttaacttacttctgcatgaatactgctttttgctttacagcccattttgtttgctatttctgttgctacatcagcttctttaaagttagaatttgccta

SEQ ID NO: 484990 - DNA, 122 bp, Homo sapiens
gagtggtgggggtgggggtagatactgatatttaccttaaggaactggctcatgcaattacagggactgacaaatccacaatcttcagggcatgctggtgaccaagggaagagttgatgttg

SEQ ID NO: 484991 - DNA, 122 bp, Homo sapiens
gttatacgtacaggttaggtgtgctgctcggtggggtgtctggtacccttccttgaattacagtctgtgtaactgaggccctgagggaagtttgggtcaattccccatgtacagatttgagg

SEQ ID NO: 484992 - DNA, 122 bp, Homo sapiens
tacctctaagtctcttggttttgtaattccaatctgaaattgtgacctttaaatatgttacagtcttattgggtttcaaaggggatgatggaaagaaatggcacttgtggaatttctactgt

SEQ ID NO: 484993 - DNA, 122 bp, Homo sapiens
tagaggctgtgaccatcttctgatggctgtgctggggcagagctgggggtgccgcaggtacagcactctacaagagcctgccaggtcacagggatgccaggcttcaaggacctgcaagatcc

SEQ ID NO: 484994 - DNA, 122 bp, Homo sapiens
gaaggtctcaaagataagccataggagctctggcaagggaaggagcctgtcaccccaatacaccactcaaaccagtactgaatgggaagactcaggcaggggccaccaggacccccacttca

SEQ ID NO: 484995 - DNA, 122 bp, Homo sapiens
atgcctccagctttttgtatttcagacctcatggggcaagggtctgggcccagcatactacagcccaaaaagggctgtgtgtggccatgctgcctggattggatatgaagtgtatctgctgg

SEQ ID NO: 484996 - DNA, 122 bp, Homo sapiens
tttgttatctcacacagtttttgtgaatcagaaatttgagagtggcttaggtgggtgctacaggctcaggatctcttgtgacatgacagtctagatttggctgggatacagtcatctgaagg

SEQ ID NO: 484997 - DNA, 122 bp, Homo sapiens
caatgaaaagagagagtggctgagtagaatagaaagtaggatccaactatatgctgtctacaggattgtcacttgggatttaaggacacaaaaggataaaagtgagggatgaaaaaaggtat

SEQ ID NO: 484998 - DNA, 122 bp, Homo sapiens
ctgcctctgtttctggaaacttccctgactagctttatcgtaaggtctccagtgagtgtacagttccaagagtctgcagagggccttttgacttgtgagatgtgcactgaaggtttgaggcc

SEQ ID NO: 484999 - DNA, 122 bp, Homo sapiens
ttgaatatatcatagagtttttttgacaattacctgagtaaattacatgtaaagcatttacaatagcacttggcaagtaagcccaataagagtttcttgctgctgtttttaatggagatggt

SEQ ID NO: 485000 - DNA, 122 bp, Homo sapiens
actgtgagtcaaattgtttcagtaacccttgtaagaatagcttatcatcacgattgtttacagtcattatggttagagtaagctaacaattgagttaatgataatgggtcaattaggagaga

SEQ ID NO: 485001 - DNA, 122 bp, Homo sapiens
ggattacaggtatgagccaccgggcccagccgacatcccctgccttgataccgatattcacagcttcccacttgaggagatggtaatggaccaagaacacagtccccctattccttggagat

SEQ ID NO: 485002 - DNA, 122 bp, Homo sapiens
ttttaacctttcacgctaaattaacttccatagtgtgattcagagctttcttaactgttacagtcagaaggacctgagaaattcccctaccaaatcctatttgatattgacaccgtttgagg

SEQ ID NO: 485003 - DNA, 122 bp, Homo sapiens
aatttgtttttcctcttagtagcagtatgctatattctataaacatcccttttgcgactacagcatcaaaggaagaatctcattaacttgctggacaaatgacaggtaagttaacaaagcat

SEQ ID NO: 485004 - DNA, 122 bp, Homo sapiens
gacagatgagttccaaggctattccaagggagaagctccaaaagaggagcacttccatctcagcactgagctggaatcccaccaggatgaattctgtgaccattgattggtgacatcccatt

SEQ ID NO: 485005 - DNA, 122 bp, Homo sapiens
gggaccacagactgggatgatgtggacagccagtcccaaaagagccaggctgttcacgtacagtcctaatgtaagctggctcactttctttagaaatgcacagaccttaattaatactttaa

SEQ ID NO: 485006 - DNA, 122 bp, Homo sapiens
gctgagtccagaactactgagacaggatttacatgggtataatgtgaagtcagatatttacagtgttgggattacaacatgtgaattagccagtgggcaggtgcctttccaggacgtgcata

SEQ ID NO: 485007 - DNA, 122 bp, Homo sapiens
gtctcaaactcctgacctcaggtgatccaccagcctcggcctcccaaagtgctgggattacaggcatgagacactgcacccagccaaatttttgttttgtttttgtttgatttttgtctttt

SEQ ID NO: 485008 - DNA, 122 bp, Homo sapiens
ggctcaaattcctgggctcaagcgatcctcccaccttggcctcccagcatgctgggattacaggcatgactaaccatttaaccataaagaatgtttttttagtcacttgaaaagagactttg

SEQ ID NO: 485009 - DNA, 122 bp, Homo sapiens
gccttgaactcctgacctcaggtgatccgcctgcctctgcctcccaaagtgctgggattacaggcatgagccactgcacccagcctagttaaaaaatttgtttttgtagagatgggaggtct

SEQ ID NO: 485010 - DNA, 122 bp, Homo sapiens
ggtgttaagccctgggttcaagcagtcctcctgctttggcctcccaatgagttgggattacaggcatgagccaccatgacagatatagagacacatatggagacacatagagatgtgcatgt

SEQ ID NO: 485011 - DNA, 122 bp, Homo sapiens
gtctggaactcctgagctcaagtgatccgcctgtgtcagcctcccaaagtgctgggattacaggcttgtgttatcttcaattgtgcttattggtcatccatacatattttttggagaaatat

SEQ ID NO: 485012 - DNA, 122 bp, Homo sapiens
ttatgtaaacattatgttctttggtaataattgatagcgttgactctatttcccaaattacagtactgtgtactctgtgtgtttagtgaaaggcacaccctccatcatcaacccctaaaagg

SEQ ID NO: 485013 - DNA, 122 bp, Homo sapiens
agcctcaacctcccaggctcaagcaatcctcccgctttggcctcccaaatgctgggattacaggtatgagccactgtgtccagccctggactcatttttgaaaaaagcacctcgcccgctcc

SEQ ID NO: 485014 - DNA, 122 bp, Homo sapiens
gtctcgaactcctgacctcaagtgatccacctgcctcagcctcctgaagtgctggaattacaggcatgagccactgctcccagctcagaagtcatatagtttgaatcatacagtatgtagcc

SEQ ID NO: 485015 - DNA, 122 bp, Homo sapiens
tcttgaactcctggcctcaagtgaccaacccacctcagccacccaaagtgttggggattacaggagtgagccaccatacctggcctcaacttttattttggattaaggggtacatgtgcagc

SEQ ID NO: 485016 - DNA, 122 bp, Homo sapiens
gtctcaaactcctgaactcaggtggtccacctaccttggcctctccaaatgctgggattacaggcatgagtcaccatgccaggcctaatctcttaattaaggaatagagagtaccttctgca

SEQ ID NO: 485017 - DNA, 122 bp, Homo sapiens
taaatgtctggcagaagtcagaatctggaatttttaccaattttgtccaatttaattttacagtcaacttgatcagctactgaggtgtgttggaagtcatagccacaatattttgcagctcc

SEQ ID NO: 485018 - DNA, 122 bp, Homo sapiens
ggtgagttcttatccattctgcagttctgtatcttttaagtggagcacttaggccatttacagtcaatgttagtattgagatgtgatgtaccattccattcatcatgctatttgttgcctgt

SEQ ID NO: 485019 - DNA, 122 bp, Homo sapiens
ttcccccatcacttttcatttagagattcaagcggtgttctgtggtgaataatacgattacagtaccccatcctttcaagtggctctgctgttaggatgggagacagtgcaaactacaactc

SEQ ID NO: 485020 - DNA, 122 bp, Homo sapiens
ccggacaataagcagcttcctttctcctgctgccaactttggtgtgggtatctggtcttacagcactgggcaaatggagcccagttcagttcaaaaacaaacagaacttagaaaacaagggg

SEQ ID NO: 485021 - DNA, 122 bp, Homo sapiens
tacaaaagattctcatgcctcagcctcctgagtagttgggattacaggcgtgtgccactacaccccactaattagtctcattcttgacactgtagtttagaaggagttggctgacttttcct

SEQ ID NO: 485022 - DNA, 122 bp, Homo sapiens
gggctcaagctatcctcccaccgcagcctccccaagtgctggaattacaggcatgagccacagcacctggcctggaatttattaataatggagttatacatcctgatcttgtttctcactcc

SEQ ID NO: 485023 - DNA, 122 bp, Homo sapiens
ccgtccagcagcaccagggaaaccagtcataccctaagagccaagcacattagaattccacagtcaacatcaactccaagaatttgggtaagatgggaatttctttgttttggaaaatcagt

SEQ ID NO: 485024 - DNA, 122 bp, Homo sapiens
ttatgaactgcattgtaaacaaagaatatgtgaaaaggaattgaagggtaattttgagaacagcctctaagtgctcacacatgagtgacagaaattcagtgacagaagggaaatggaagtgc

SEQ ID NO: 485025 - DNA, 122 bp, Homo sapiens
ttttgacagaaccattaatgttgacacactagcacaatctgttggattttctagtagctacagcaccatggttttggagattcctcaattctaataacaataatggtggacagggttaatgt

SEQ ID NO: 485026 - DNA, 122 bp, Homo sapiens
ggcctgccagggacaccccagtgacccaagtagagccccagtcctcaggaagcttacttacagcagagaacacacaagtaaagaaataagctacacaagttagtaagtgctagcggggatgt

SEQ ID NO: 485027 - DNA, 122 bp, Homo sapiens
tgtactgcagaaagcctccctcccaccctgtcctccagctacccagtcccctccctgagacagccagggttaagactttgttgtgtatccttttagagatgttttatatatgtaagaggaca

SEQ ID NO: 485028 - DNA, 122 bp, Homo sapiens
tacaactttgtgaatatactaaaaaccccttaattggataatttaacaggttcacttttacagtatatgattaatatctcaataaagctgttatttaaaaacagaataagccgccgggcatt

SEQ ID NO: 485029 - DNA, 122 bp, Homo sapiens
tgtgtgcctcaacttcctcatggaagcacgtgagattattttataaccatagagtggagacagtcagtatgaccaccaaacccaggagccatatattaaaatactgataaatttaactatat

SEQ ID NO: 485030 - DNA, 122 bp, Homo sapiens
tgtcatagcttagcctcgcctattttaagcgtgctcagaacacccacgttaattagtctacagttaggcaaaatcatctaacacagctgtccccaaccttgttggcaacagggaccagtttt

SEQ ID NO: 485031 - DNA, 122 bp, Homo sapiens
gaaattaaaaaaaaaaaaaaaaccagttgattaattagcatgaaccagaaatcacctctacagtcctggacatacaggtcaccttgccaccttcctgatggctggttctagattcagtgtgg

SEQ ID NO: 485032 - DNA, 122 bp, Homo sapiens
agaattgtctatttgaagctcttaaaagcctggctaagacttaaatgataataaactttacaatgccaactattttggctttagcaaattaggtgtttaatctataaactatgtctatctac

SEQ ID NO: 485033 - DNA, 122 bp, Homo sapiens
gtctcaaatgcctgacctcaagtgatccacctacctcagcctcccaaagtgctgggattacaggagtgagccaccatgcttggtctgggatgtcaattttaattggccaccagatgaccctg

SEQ ID NO: 485034 - DNA, 122 bp, Homo sapiens
agtgggatttttagtgactttacattcaacattcatagaacaaataattcacgacatctacaatatgccaggtactgggccagttctggatacagtggggagaaaggaaggcatggtccctt

SEQ ID NO: 485035 - DNA, 122 bp, Homo sapiens
gctgttaaagacatgatgatcagattatcagattcgaataaccaactgaggcaaattttacagcattaaagtctagagtatgtgtagattacagaaaagagagctggggtgtgtgtgtgatg

SEQ ID NO: 485036 - DNA, 122 bp, Homo sapiens
ggaaaagtttcgtccaaatactggatgctttgagccgtttgtcttatatttccctgattacagcataggtaaaccttaaaacattgttttggcaaatgatatgcaggagaatagtttttgtt

SEQ ID NO: 485037 - DNA, 122 bp, Homo sapiens
aagattgagttcataacaatattgcctattttcttaatttattgttcacttgtgaatttacagccacagccacctatattgaggaagatgatgttaataattactctatccatgatgtggta

SEQ ID NO: 485038 - DNA, 122 bp, Homo sapiens
tccaataatgtaattacatcaacagatttcctattgctggccaccaccacagtcctggaacaagccatgttaaatcagtccttaaatatagtcctggggtgataaattatttacttggataa

SEQ ID NO: 485039 - DNA, 122 bp, Homo sapiens
cattagcatggaaaaaggaatatacgtttctgttgctttgattttgtataggcataacaacagtaactcaccttaagtatttggagagtacattaatagcatccatggtgtctttgttttcc

SEQ ID NO: 485040 - DNA, 122 bp, Homo sapiens
tgaacagcaagtgtggcccggcgcgtctggggacagggtggagggggactgacagttttacactcttcagtagttgtgagtgttgtactgttgtgtgtggattgcttattcccgaagtgtaa

SEQ ID NO: 485041 - DNA, 122 bp, Homo sapiens
aaagctcctaacaagaggtagccgagaacatttcgcactcatggggtccttggagggctacagcagcaagctttgctttggtaacagaaggctgcttcagcaggtgagctgtgtttcaaagc

SEQ ID NO: 485042 - DNA, 122 bp, Homo sapiens
ttgaatgcctgggctcaagcagtccttccaaccttggccaatcccaaagcgctgggattacaggcatgagccaccacacctggcctgtgtggagttctttgtaaatacaaatgctacagtgg

SEQ ID NO: 485043 - DNA, 122 bp, Homo sapiens
ttgccaaacaacaacaagggattggtgatggtgcctcccagctctccctggtgaaatcaacagtcagtcactttcatgttgaatgagaaaaacaccagggctacagagaatcttattattgc

SEQ ID NO: 485044 - DNA, 122 bp, Homo sapiens
ttgttgtttttcatagctatttttccttccttattattattattgagtgatttaagcctacagccatgttgaggcatggtggctcagcagagctgtctgggaaaaaatgcacgtgattgcca

SEQ ID NO: 485045 - DNA, 122 bp, Homo sapiens
ctgcacaacaattttttaagatcttaaaatgttggtggattaaaagcctgaatgcatttacagtcagagcagataatacaaatgtataaattggagtaaggagtgctgccaggcaaaactat

SEQ ID NO: 485046 - DNA, 122 bp, Homo sapiens
caaaaaaaaaaaaaaaatgcttgcttttctacctggccacaatctgttggagttggctaacagccacccctaataatcaaataaatggaaatgaaaatagtacctggctgctggtaggtagt

SEQ ID NO: 485047 - DNA, 122 bp, Homo sapiens
gcactgttgagaagaattctttattcttcaggtaacctatcctatcagtctttgttcttacagccttcaagtggttgaatggagctcacccacattatggactatgatttgctttactcaaa

SEQ ID NO: 485048 - DNA, 122 bp, Homo sapiens
acacaggcttgcagctagaagtagtgaaatcagaattcaaacataggcagcctggcactacagctcttccaggggcactttggcattgactaggtatccctgagaaaacaccaccaaccagg

SEQ ID NO: 485049 - DNA, 122 bp, Homo sapiens
aggctggagtacagtgatgtgaatctcaagggatcctcagctactgagtagccaggactacagacattcaacaccatgcctggctagtttttatattttttgtagagatggcatttcaccat

SEQ ID NO: 485050 - DNA, 122 bp, Homo sapiens
aacatacatgagaaacttcctgataggctcctgtcatccgtgatgcccgtaacaccacaacacccaacagccagtgctcaaaacattttgctgaacatgtgatcattgataaataaatagag

SEQ ID NO: 485051 - DNA, 122 bp, Homo sapiens
cacctcagcctcccaaagtgccgggattacaggcatgagccactgtgcccgggctgactacagcatttaaacatttctactcacaaggagaaaggagtttgttactttctttgaaaaatgat

SEQ ID NO: 485052 - DNA, 122 bp, Homo sapiens
accagcaatctagtctgtcagaggatataccactaaactcttctttctaactttagtttacagtcaaaatgggattgctgaacctgggaaaaaaataaatgcttcccaatttcctatttaaa

SEQ ID NO: 485053 - DNA, 122 bp, Homo sapiens
ggcatccttggtgacagggtttctgtacttcacgcagggacaaagactagcaaaatattacagctctcttgtaccaggcagtaccctaagagtgacagccaggcttacagccttcagatgag

SEQ ID NO: 485054 - DNA, 122 bp, Homo sapiens
ctcagcttggagaattcagatgtcgatgagacaaaatggatcctactctcctggagattacagtctagcaggggaaatgtatattaagcaaatatcacacaaatagttgttaagttgtgata

SEQ ID NO: 485055 - DNA, 122 bp, Homo sapiens
aatattgttcttttagttttttaaaaaccattttaaaatgtcaacaccattgttagcttacaggacatacaaagacagctgatgggtaggtttggcccacaggtcatggtttgcccacccca

SEQ ID NO: 485056 - DNA, 122 bp, Homo sapiens
gcacttactaagtgatgactaaggcaggccggggcctacgcttggtgttatacacatttacaagcaacaatatgtttgggcaatctaaaaattatttatgcaacaagcaatcacctctggag

SEQ ID NO: 485057 - DNA, 122 bp, Homo sapiens
gttaattttataattctcttacattacaataatgtgaagactttcctattctcacagctacagggatgagatcctgaatgtgactgtggtcatggatgagcaaaatcctagatttttataca

SEQ ID NO: 485058 - DNA, 122 bp, Homo sapiens
ttacagcaacagcaggaacagttacagcagcagcagctgctacaacagcaggaacagttacagcagcaacagtttcaacagcagcaggaacagttacagcagcagcagcagctactattgct

SEQ ID NO: 485059 - DNA, 122 bp, Homo sapiens
gagcagaggctccactgtaattgcagcatagaaatatgaccagacaactgagtgttctcacagcacctatctaaaaagaacctgctctggagcaaacaggtgaaggtggtgatacaattcaa

SEQ ID NO: 485060 - DNA, 122 bp, Homo sapiens
taaatgaatccaatttggtggctcccaccttcaaccccattgatttacaacttccaattacagcacataagaacaagtcttgtgtgtgtcctagggggttggagaaaagaaggaagaaagtg

SEQ ID NO: 485061 - DNA, 122 bp, Homo sapiens
tttcatataagttgtaaggtaggggtttaatataataaagttttattttcaaattttctacagtctttaaacaagctgtagtgtattagcagcctccacacagtgacaggttagtacgagta

SEQ ID NO: 485062 - DNA, 122 bp, Homo sapiens
aacaggaagaaacaggaggattaggccttctccctgctattcattctcagccaagatttacagtatccaagtaaacattcaggaaagtagtcagacacatgaggaattggtactaagagaca

SEQ ID NO: 485063 - DNA, 122 bp, Homo sapiens
gtcttgaactcctgacctcaagtgatccacccgcctcggccttccaaagtgctgggattacaggcatgagccactgtgcccagccactgtttgtctttgatagcagccattctaacaagtgt

SEQ ID NO: 485064 - DNA, 122 bp, Homo sapiens
ttatcaatatccataagattgatgtcgggcgtatttctcccctcctaaaacttgggattacagtcattaagaaattaggaggaaaaatgtgtatattactaatggttgtcttaaatcttcat

SEQ ID NO: 485065 - DNA, 122 bp, Homo sapiens
attctgccttgctggctcatttcctgttgtccagagccattctcaccttttgctaggatacagcactccacatcagtggaactttggggtcacaaggctttttatttaattctaatggaatg

SEQ ID NO: 485066 - DNA, 122 bp, Homo sapiens
tggtgtgagctgataaggccctagatttatttctggggaatctgcactcttaataatttacagacaacacaggtctgctttggatctgatcagatggactaaatcttggggcctctgtaccg

SEQ ID NO: 485067 - DNA, 122 bp, Homo sapiens
ggtggttcctggtctggctggcctcaggagagaagctgcagaccttagtggtgagtgttacagctcataatggcagtgtggacccagagagtgagcagcaccaagacttactgcaaagagca

SEQ ID NO: 485068 - DNA, 122 bp, Homo sapiens
aacactccaattaaaaagtagagacagtggataaaaaagatgcctactatatgatatctacaagacatgaactttaaatacaggtcaacagtaaaagggtgggaaaagatatgcaaacaata

SEQ ID NO: 485069 - DNA, 122 bp, Homo sapiens
aattaattactgcactgtagttcttgcccttgcaatgctcatggggtaaaataacaattacagccatgcagtatttactatataaaacagagacatggctgggcacagtggctcaagcgtat

SEQ ID NO: 485070 - DNA, 122 bp, Homo sapiens
gtttcgaactcctaacctcaagtgatgctcctgccttggcctcccaaagtgctgagattacaggcatgagccagtgcacctggcctgaattatagattgcaagactggggaaagatgtagaa

SEQ ID NO: 485071 - DNA, 122 bp, Homo sapiens
aatagcactttgacctgggtgaaaggcagaagctgaacaaaaggcttaaggagagatctacaatcataaccctaatgtgaaatttggatgggatttctacaataaggacagggtagctcagc

SEQ ID NO: 485072 - DNA, 122 bp, Homo sapiens
gggaaaaactgaccagcatttaacatcaacacagaccttaagtttgataagaaacatttacagtctattctctctgaagcctgctatctggaggcttcttctgcatgataaaagtttggttt

SEQ ID NO: 485073 - DNA, 122 bp, Homo sapiens
caaggaggtggtaaagtttcatagaaagagttctgagctaggagcaggtggacctggttacaggacatgcttgctactgtctgattctctggcattgggcaaatgacttaacctctctgacc

SEQ ID NO: 485074 - DNA, 122 bp, Homo sapiens
actgcagttgactgcagggaattaaaaccatgaaaccttggataaggagggactactgtacaagcaggttgctaagatcagtctagtgtacatttcctgataggtgtgtatgagagtttctc

SEQ ID NO: 485075 - DNA, 122 bp, Homo sapiens
gaggagctggttggaagattgcaaagtggatgggtcttaactgactagtggcttttattacagcatgatgagactgtaaactgctttgtttagggagactcaggctcctttcatgttgttgc

SEQ ID NO: 485076 - DNA, 122 bp, Homo sapiens
agctcgatctcctgggctcgggtgatttccctacctcaccctcccaagtagctgggactacaggcatgtgccatggtttagtatttttgtttgcttttgatgaactcttagagatggaagga

SEQ ID NO: 485077 - DNA, 122 bp, Homo sapiens
tggtagtaaataaataacacaaattcatgcatttgttgaggaaggcttgatttcaggttacagtttatatagcatggagcttattgatacagagtggatcttaagttttgttgctggttgtt

SEQ ID NO: 485078 - DNA, 122 bp, Homo sapiens
cttctggagtttttctctctctagttagtccacactgatcctctagtaattcatcaattacagttgaagtgttttaccagtgctggctctagcagcaggcttctgtacaagggcttttgtct

SEQ ID NO: 485079 - DNA, 122 bp, Homo sapiens
ggccaaagtgggggccatcaatactgtcgggtggccggtctcctcactgtattccttttacaggaaccttgaccaggacatgcaaatcccacaaaaagatgatagtgggatcttccaggcac

SEQ ID NO: 485080 - DNA, 122 bp, Homo sapiens
gcacagggggctggcatgatttttggctccctgcttacaggactggaatgtggtttccttcagcagtagacagggaagcagcttgatgtctctagaagcttgtttagtctccagctttgtgg

SEQ ID NO: 485081 - DNA, 122 bp, Homo sapiens
aagacaagtagaggaaaggaaagcaaatgtcaccagacagaatgtatggctgcaggtttacagcagattctattaaaatctatggttgggctgggtgtggtggttcacccctctaatctcag

SEQ ID NO: 485082 - DNA, 122 bp, Homo sapiens
ttggaaagggacactgaaacagacttgagccttgtgtccataattcagacaacaccgttacagcactgcatagctgccacaggactagctggaaggacactttttgtggccaccagcaagcc

SEQ ID NO: 485083 - DNA, 122 bp, Homo sapiens
gagataaaaataaagagaaagaaggaaggtagaatagagggcaagataggcatctgggaacagctttcacaaaaatagaagtgcaattaaattgatgtcttccaaaatggtctgaactcaca

SEQ ID NO: 485084 - DNA, 122 bp, Homo sapiens
tttagctagacacagagtgctgattggtacgttgttacagagtgctgattggtgcatttacaatcctttaggtagacacagggtgctgattggtgtgtttttacacagtgctgattggtgta

SEQ ID NO: 485085 - DNA, 122 bp, Homo sapiens
gaagcaggagctgggcctaagcagagctgtgcagaactagagtggcttcagaagacacaacagcaaagacccaaaaggacatcagtatgcacccactggtggaaatgggatgacaacttcat

SEQ ID NO: 485086 - DNA, 122 bp, Homo sapiens
ggagatttgatcaaaagcagaggtgaaggaggctgtccttaatcaacagagaggatattccactctatgggattcaggcagctagagggattgatgtggttgcacacaaatttgaagatgaa

SEQ ID NO: 485087 - DNA, 122 bp, Homo sapiens
gatccgcagtgcctgcagccttcctgggggaggcctggcctggaaagcctcctccgattacagctgataggcaagtggagccctagataccatgctggggacagacactgcagcactcgtgg

SEQ ID NO: 485088 - DNA, 122 bp, Homo sapiens
gtcctagctgctcaggaggctgaggcggcaagatcacttgtgcctaggagttcatagttacagtgagctgtgatagcaccactgcactgcagcctaggagacagagtaaaaccctgtctcta

SEQ ID NO: 485089 - DNA, 122 bp, Homo sapiens
tgtctcactggctcgcaacagggaagaacagaaattgagagtaaatcaatgtgaactttacagcaattaggcagagtaatttcatatctgttgaatctaacaaaaaatgggatttgtgtttt

SEQ ID NO: 485090 - DNA, 122 bp, Homo sapiens
tttacaggaaagcatggtgctggcatctgctcagcttctaagaatgcttcacgaagcttacagcaatgttggaaggcaaaggggaaaccagcacatcacatggcaaaagcaggagcaagtga

SEQ ID NO: 485091 - DNA, 122 bp, Homo sapiens
tcagtcaaaagcccaaaggttatgattaagggctgggaaatagggaaaatctgtgggttacaggcacagggaaggacacctatgtggtatatttactccaagtaagaagttgagcaaacatg

SEQ ID NO: 485092 - DNA, 122 bp, Homo sapiens
catgtgagtatatagctatagcagagtggatctgtgtatccaggtgtgaatatacagctacagcagagtagatccttgtccacatgtgagtatacagctacagcagagtggatctctgtatt

SEQ ID NO: 485093 - DNA, 122 bp, Homo sapiens
taatgaatgactaaataaaaaagagctaaaaaatcacagcatggattgcttgctgggctacagccattgatattcatgttctgctctggaaggaagcttaggatatggtggcatcagacttg

SEQ ID NO: 485094 - DNA, 122 bp, Homo sapiens
caaaattatgtatcatttgtttgattgtgtatgagtgaatacagcatcactgaggctctccagtacctgcaatgctacatctcctggaacatgatgcagaggaaatcactgcacagaaggcg

SEQ ID NO: 485095 - DNA, 122 bp, Homo sapiens
ggcaggagctaacagcacaattactaaaacattcactggctgtggatcaatgttataccactggcaaaaactgcattagctggtacaacctggtgttgaagagagatgtagtaaacagtaac

SEQ ID NO: 485096 - DNA, 122 bp, Homo sapiens
taattgactcagttctccaggctgtacaggaagcatggctgggaggcctcaggaaacttacaatcatggcagaaggtgaaaggtaaatgtgacagttactattgagtatcaacttgattggg

SEQ ID NO: 485097 - DNA, 122 bp, Homo sapiens
taaatgtctgtttacatactttgagtcttaggattctcagtatagcttgaggctggattacagtcccaagcaaacagaggctgggacagagccatagaccccactgtgtgtaagaggcaagt

SEQ ID NO: 485098 - DNA, 122 bp, Homo sapiens
gggctaatgtagatcatccgctaggttggctaactgaagctgaaactcaacagtggtttacagtctgtgaagtgcaaatcctgcaactaccctggcatgttctggcagagattctctggtcc

SEQ ID NO: 485099 - DNA, 122 bp, Homo sapiens
gtcaggagagggtcccaggtagacttccattcatggacagcagcaggcaaatggaatttacagccatcatagatggggacagcagcaagcatgtgactgtagacagagaagaagaggagtga

SEQ ID NO: 485100 - DNA, 122 bp, Homo sapiens
gcataaatggaaatgagttttccacattcctcagtgtatcttgctctaatgtaaacgctacagtcatcaagtctccaatgggaaacaaactagccctttaaagggacagtgccctgcaaatt

SEQ ID NO: 485101 - DNA, 122 bp, Homo sapiens
ttcactttaaagaaacttcccttttgtgtgtgcaattttttttctcaagcagctgcactacagctatcaacaaaggaacaaagtaattcagctctgagcaaactcactccaattacccataa

SEQ ID NO: 485102 - DNA, 122 bp, Homo sapiens
ttgtctttttacccacgaataggtttacttattctaattttatggccacttttctatttacagcacagaagagatccccttgaagattttagctcataataactttgttggacgtcttattg

SEQ ID NO: 485103 - DNA, 122 bp, Homo sapiens
ttttaagacaaaaatatgtggcaatcctccagtgaccagattttccctgcctacctccaacagcaccagcctcagtgacagggaagacacagatgtctgaattcagagcagaggccacatat

SEQ ID NO: 485104 - DNA, 122 bp, Homo sapiens
gaaggtggaaggaaaagcccagtggtgccccacgtaaagtctcatatgggctccgctccacagtcataaactgtaaacccaggaactctgttgtaagaattttgtcagcattgtaaaatctc

SEQ ID NO: 485105 - DNA, 122 bp, Homo sapiens
acaaactgttggacctttgagtgaggccagcttggaccttcttgtgcaattgataaattacagccatgtgagatattgaaatccttgtgaactattggtaggaatgtaacatgctacagcca

SEQ ID NO: 485106 - DNA, 122 bp, Homo sapiens
ggccccactgactaatacgcccctatgcaggcttgcacagggtggtcaggaatggacttccagccctcaggtgacacccatctgcagcctctagcaagcagctagaaatcaggagagatggt

SEQ ID NO: 485107 - DNA, 122 bp, Homo sapiens
taaccagccccatattactgctggacatttggattgttttcagtctattgctattacaaacagcactgaagtggataacagccttatgcatctgtcatagtgtctggtctcagtttatatat

SEQ ID NO: 485108 - DNA, 122 bp, Homo sapiens
tcaaatatgaaaacatagcccagtccatggctcttttggcaacaacccttagacactttacagccctagactctgaaaggtcagaaggctgtcttagtatgcattttagtacccaatccact

SEQ ID NO: 485109 - DNA, 122 bp, Homo sapiens
aaattataccatatacataattttatactctgctttgtttttctcaacaatatgttgttacagcatgcaaaattatatgaaattctatgaaaacagtttgggaaaccaatttaattgttttt

SEQ ID NO: 485110 - DNA, 122 bp, Homo sapiens
tctccaactcctgagctcaagcaatctttcctgcctcagcctctgaaagtgctcggattacaggcatgagccactgtgcctagccaatgaaatttttgagggagacagataagaataaaatc

SEQ ID NO: 485111 - DNA, 122 bp, Homo sapiens
agaaatctttctgagataaaattgaaccaagatctaactgatgagaaagacacagccatacagcaatctgggggaagaatattccaggcaaagtgaagagcaaatgaaatggatccaagatg

SEQ ID NO: 485112 - DNA, 122 bp, Homo sapiens
ctgtcacccggggaggccagtgtgacgcgtgggctaagcggggaggtgggggccgggttacagcatagccaggaaacaggcctgagaagcctgctgcagttggggaaactgaggcccggaaa

SEQ ID NO: 485113 - DNA, 122 bp, Homo sapiens
aggaaattttttgaagtataacaaggatattccaatcagaaacatagtagtatagcgttacagcccaaatgattgtgcatacagaccttactgtgatactcttaagattggggggtaaactg

SEQ ID NO: 485114 - DNA, 122 bp, Homo sapiens
ggcataggctctcccatggccactgcagctagtgtcatgctgggttgtaccctgagcccacagcctctgagagcagtgtggcaccagggctcattcaaggactgcagtcaggatggtctagt

SEQ ID NO: 485115 - DNA, 122 bp, Homo sapiens
tgagaatgaatgatggctgggagttggtcagaaagtgtgggaactgacagaacagctttacagcaagtgtcttctcaggcaaatagattttgcaaatagtatctatgaaaatgagaatatga

SEQ ID NO: 485116 - DNA, 122 bp, Homo sapiens
gcccatggtccccgtactgtgtgcagtccagggacttggtgcctggggtcctggccgctccagccatgactaaaatgggtgaaggtacagctcaggatgttgctttagatgatgcaagccct

SEQ ID NO: 485117 - DNA, 122 bp, Homo sapiens
agggagactcagaggtccaggggctcagaacctcgggctatacatacaggagtgtgtttacaggcatgtacatgcagaggtgtgggcatgcaccactgccactcctggacacatgacccgtg

SEQ ID NO: 485118 - DNA, 122 bp, Homo sapiens
gggggagttctccaagatcttacctaaacccacgaggggtatatgagactgcaagacttgcagcattaaggagcttgttgtgtcccttgtgcagatacacctgcagtgaccaaatacttaga

SEQ ID NO: 485119 - DNA, 122 bp, Homo sapiens
taggggtgtctagaggcctagaactgccaggtgaggatatatgggaatgggcacatgtaacagtctggccacttttccacagggctgatgtagtattctggggttccattccagttcgtagt

SEQ ID NO: 485120 - DNA, 122 bp, Homo sapiens
catgggctctggggccaggttgctggacctaggttccaacaggctggggtcagggtgctacagtcactaagatgtgaaaagcagagattgtctcctaggcaacttgttcccagggtgtgggg

SEQ ID NO: 485121 - DNA, 122 bp, Homo sapiens
gaacatatcaggacagctgagagaatccacagaccctttgaaggaggtgggttgctgctgcaggctccatgggacagccaaggaactgtgagtctgtctgctttctcacctggggggcttgt

SEQ ID NO: 485122 - DNA, 122 bp, Homo sapiens
gggcgtccgaaaaaggcctgacgtgcctttttttgtctttttttcctccaccacctaatacagtacctggcttatattagacttacaactgttgaagaaagggatgaaaagaaaagggaaag

SEQ ID NO: 485123 - DNA, 122 bp, Homo sapiens
cggctatggaggctacatctccccacccctgcctcatgaactaggccaaagccccacagacagcagcatgggcctaagctgaagaggctgccttccccagataaggatggattctatgtgcc

SEQ ID NO: 485124 - DNA, 122 bp, Homo sapiens
atgcagagtaaaggccagcgattgggtcagaggcaggagaacattggaggcatggacttacagccccagtattgattttacattgaattccaggttttgctgcaattaaaagctactgcaag

SEQ ID NO: 485125 - DNA, 122 bp, Homo sapiens
agaagaaggatgaataggccattgcaatggattagcctgttctggattagttcaaatttacagcagaaagttgggatttttagagataatatggtcctagaaactactttggaaaatggcat

SEQ ID NO: 485126 - DNA, 122 bp, Homo sapiens
tgaagagttggcttcctttgattggctgaaatttggtgattgatataagaaaataggttacagtctgttgaaacatccagttaggttatagttccctatgtgtggagaaacctgtagactga

SEQ ID NO: 485127 - DNA, 122 bp, Homo sapiens
tatggcactataatggtggatacatggatctatgaatttttcaaatcctatagaactttacagcacaaggagtaaaccttgaaattgtgaaaagagtggactttaagtgttctcactacaaa

SEQ ID NO: 485128 - DNA, 122 bp, Homo sapiens
cacagtcataaagctcctggttttgttgatcagctcctaattgcattatcattctttttacagcacagagactaaaactggaccagaagccttcttttgccaacaatagggcttgtggcggc

SEQ ID NO: 485129 - DNA, 122 bp, Homo sapiens
atgttggctactagcaacttaaccaacacgttgtccttgtccttagaaaatgtgtggttacagccaggtgtgagcaggcctagaccaggcttggggatttattgaccaaatgtggtgccttt

SEQ ID NO: 485130 - DNA, 122 bp, Homo sapiens
tggtctcgatctcctgacctcgtgatccgctggtctcggccttccaaagtgctaggattacaggcatgagccactgagcccagtcatgagtatgatttcttaatgcctcacaggtggcacaa

SEQ ID NO: 485131 - DNA, 122 bp, Homo sapiens
taacatcccactgtgaccctgtagctctgttactggcacagtaccattgtttttgttttacagttataattgataactgcctcttaaaggttagtgtccctggcctctgaacactgtgattt

SEQ ID NO: 485132 - DNA, 122 bp, Homo sapiens
acagggtggtttcctgagagagacaggcatggatgggattaacataaacttgtgagactacagcagtcagctttgaaggagcaaaacatggtgctacagaacatgtgatgggactgagcatg

SEQ ID NO: 485133 - DNA, 122 bp, Homo sapiens
tgttactggcccaagaagagataagcatagaaatggagagtaaatgcttagaaacctttacagcaacttaaagttaagtgggttatgtggttgactgtaataataaagtttgcagcctgggc

SEQ ID NO: 485134 - DNA, 122 bp, Homo sapiens
atttagaaagtggaactaggtggttgaaaaaagtgtatagatgggtggaagggaatattacagctcttagaattgtcctaaggtgagagtaacaaattaagcaatgagtccctgggttcact

SEQ ID NO: 485135 - DNA, 122 bp, Homo sapiens
aggacctttttaaaaagatgtgtttgtaactaagcaatacacctttcccaaacctaattacaagacatttctgcacataagacaagcaaactaaagacttaatggcaaactgctggcaagtt

SEQ ID NO: 485136 - DNA, 122 bp, Homo sapiens
tgaactcctgacctcaagtgatcctcaagtgagccttggcctcccaaagtaatgggattacaggcattacttaccatgcccagcctggtgataataattttgattgtttggtctctccactg

SEQ ID NO: 485137 - DNA, 122 bp, Homo sapiens
tcttgaactcctgagctgaagcaatccacccgccttaccctcccaaaggtgctcagattacaggcttgaggcactgtgcctggccatgggtgccatctatctaaagagtgatgaacttggtg

SEQ ID NO: 485138 - DNA, 122 bp, Homo sapiens
aaagggggaaatagttcatttatgtaggtagtacacacactttatatgtttaagtacttacaagcatagtgaatttaagatcaaagacctggtttcaaatagaggcaacactacacagtaat

SEQ ID NO: 485139 - DNA, 122 bp, Homo sapiens
aagaaattggacttaggaactgaaccattagagaaccattacagagataagagacaattacagtttatgttatatgttcatgacagagatatattggcttgtgcattcaaaagtctatgcat

SEQ ID NO: 485140 - DNA, 122 bp, Homo sapiens
tggaaaccatcatcctcagtaatttaacacaggaacagaaaatcaaacatggtatgttctcactcataagtgagaactgaacagtgagaacacatggaacacagggaggggaacattacaca

SEQ ID NO: 485141 - DNA, 122 bp, Homo sapiens
tgggatcaccttccatgtgcgttggctccatagtgagctctgaagcagacacttctcttacaagacttcagatgagatagcagatgacccttgagagcatttttagaaatccagtacattct

SEQ ID NO: 485142 - DNA, 122 bp, Homo sapiens
gatgcaagctgttagtggatctaccattccggggtctggaggatggtggccctcttcttacagctctgctaggcagtgccacagtgaggactctgtgtgggggcttcccaccctacatttcc

SEQ ID NO: 485143 - DNA, 122 bp, Homo sapiens
ataaaggagtgagcgtgtttattctctcagtcaattgatttccttctttaatgtcagctacagcattcagcttctggcaaagacagaccaaatagttcagacaaaccctcctggtgaaaaca

SEQ ID NO: 485144 - DNA, 122 bp, Homo sapiens
ggtctcgatctcctaacctcaagtgatccggcttccttgacgtccaaatttctgggattacaggcatgagccactgcacttggccaacactgtttgtttttgtctgtttgtttgtttgtttt

SEQ ID NO: 485145 - DNA, 122 bp, Homo sapiens
gagttgttttagagtgctagaattattgaccatgaaggggtcatggcaagcccaaatttacagctagtcagaagggcaggtgctcccccaagatgcatctgaaatgagggcagtcctgagga

SEQ ID NO: 485146 - DNA, 122 bp, Homo sapiens
cagttaaattagattgtccccaagcagcagaaactagttttgtatcaagctacattgaaacaggcattaggaatagcaggggcactttcaagtgttggcagttgtcaagtgtgtttagcaat

SEQ ID NO: 485147 - DNA, 122 bp, Homo sapiens
taagtatggtaagtatgcaaaagggggggggaagagaaacttttctgtgtataaatattacaagcactgcctcagctaagtggtccaggtcagcatcagcagtgaggccatgttgataggac

SEQ ID NO: 485148 - DNA, 122 bp, Homo sapiens
cagtgtaaactatttggcagttttattcaattttggccttattctctatttgctgacttacagcaacagcatcttaattgagttcccaccttcaaattgatgatgaggagggcaagcatgat

SEQ ID NO: 485149 - DNA, 122 bp, Homo sapiens
ctatgggacagcttttcagaaggaaaaagatgaagattgattcttgtatgttctggcctacagcacttggaacattttgggcttctgagggccattagatgtgtaggtgcaccgttcctgtt

SEQ ID NO: 485150 - DNA, 122 bp, Homo sapiens
acaaagggcacttgttgactggctggtgttgtaagtgtatgaggaaactaaaactgcctacaagccttttttgctgttctgcaggaagctagaccaagaatgaagttaatgcatggattagg

SEQ ID NO: 485151 - DNA, 122 bp, Homo sapiens
gagagctccagttggcatctggcaggtacccctctgggacgaagcttccagaggaaggaacaggcagcagtctttgctgttctgcagcctccactggtgatatacccaggcaaatggtctgg

SEQ ID NO: 485152 - DNA, 122 bp, Homo sapiens
taagtgaaaagtagaaggttaagcctgtggcctaaagcttgggctgccctggtgagtttacagtagctttctcagaggcttgtgtttcaacatgtgacagggaacaggaaatatggaaatta

SEQ ID NO: 485153 - DNA, 122 bp, Homo sapiens
gaaccaattctcaggcataaagccaaagccatgtgtaaaccctgtgttggagaggcgttacaggcctggcaggcagcaagcaggcacctgcctgccctagctctacactagagtttcttaaa

SEQ ID NO: 485154 - DNA, 122 bp, Homo sapiens
gagaggtactcactcaaggtagtgctgtttcaacattagatcatgctatcttcctttcaacagcagcatatatttgtaaaactgggttttctgtggttgctataataaaaaaaaaaaagaaa

SEQ ID NO: 485155 - DNA, 122 bp, Homo sapiens
ctggagagatgaactgcccatgtggagatgataaacatcacatggcattttaagtgaatacagcacttgagctcacagcaacagcaacaggaggtagctctgaaattatggtagtagtgcag

SEQ ID NO: 485156 - DNA, 122 bp, Homo sapiens
attgctgagatgatagaacatttcaaatggttgctgcacagctcagtcagcacctggttacagcatggtgcctgcagagtggaagagtcaagatgtgctcatccagctttaacacttagaaa

SEQ ID NO: 485157 - DNA, 122 bp, Homo sapiens
tctagggaatggagggagaagggatacccagaagcaggattcagggggttagagcacttacaccatgctcatggccatgcccatggacaggagaagcatatgatgggtgcacatggtggagc

SEQ ID NO: 485158 - DNA, 122 bp, Homo sapiens
tccagtttatgaggtgaggaaactcagttccgagtgatccaataacttgcccaagtcacacagccaatgtgcattggagccaggacccatggcattgtgaatccagaactgtgtcatgtaac

SEQ ID NO: 485159 - DNA, 122 bp, Homo sapiens
tccagcatagttggttggtgcctgtgctcttccctgagattttgtgcgagtcagtgagtacagcagggaaatcactgcacaggagcctaattgagatggagatattggcagcaggctcagca

SEQ ID NO: 485160 - DNA, 122 bp, Homo sapiens
aagttccaaaatatagtttattgtatctttcatcattaaaaatttgttcttttttcactacaggcagttcacacaaggcaaaaactattgaacagttggttttagtgggtcatataactttg

SEQ ID NO: 485161 - DNA, 122 bp, Homo sapiens
gcagctgtttggagaactaaaacgcagcaagcgtgaaaacagattccatttggtaggctacagcagctgtctaggcagtatgtaataatggataggactacagtgactacattggacatgga

SEQ ID NO: 485162 - DNA, 122 bp, Homo sapiens
cagaaagagaagctataaagaaggctgagaatgcatagttagaaggataagaagagattacagacagagaaactgagaaaggacagagtttaaactacagtgtcagataaagcaggagtcaa

SEQ ID NO: 485163 - DNA, 122 bp, Homo sapiens
gaaactgtctcacaaaaaaaaaaaaaaaaagaaaaagaaaaagaaaatgtcttatggctacagcattgtgcctggtagacaggataaggtcagagaggtgaacaagagtcagaacatgttca

SEQ ID NO: 485164 - DNA, 122 bp, Homo sapiens
ctggggaaacttcattttgaaaaggagtcttgtggaaattggttgatccttctaagtttacaggcagtaaaatttctaagaaatggagatggattttcagaaagatgtttgaggactggaac

SEQ ID NO: 485165 - DNA, 122 bp, Homo sapiens
actgagataatgtaagaaaagcagccagcacaagggtctcgtagatggtagccgttattacagctgtcttgcagggaaatgtgtttgctcatatagttcctcacctgtgagctggggcatct

SEQ ID NO: 485166 - DNA, 122 bp, Homo sapiens
gcagagctggactggaactttggctctgctacttacatcagtgcacccttggttaagttacagcactgttctgagcctgtgcttccttatctgtaagggggggatcataccttcacttaata

SEQ ID NO: 485167 - DNA, 122 bp, Homo sapiens
gtctctaactcctgaggtctggtgatctgcctacttcggcctcccaaagtgctcagattacaggcttgagccactgtgcctggccaagttatgcaatttatctgagactcagtctcctgctt

SEQ ID NO: 485168 - DNA, 122 bp, Homo sapiens
cttctagggagacaactgggaaaaaaaattcaagcagggggaagagcgtcttcaaagatacaggagttggatcataatagtgagttctgagatcctcagcaattcagcatggcagtattata

SEQ ID NO: 485169 - DNA, 122 bp, Homo sapiens
ggatgcatcaggctaggaatcaacgggtttgttttggccaagttaagtttcagatgcttacagactatcaagcaaatatccaagtgactattcaaatatgtgagtttggagtcatggaaaag

SEQ ID NO: 485170 - DNA, 122 bp, Homo sapiens
gtgtttgtgtggtttccttgagtttatcttatttgatatgcactcagcttcttgaatctacagtactttgcttttgtcaaattttggaagttttcagccattatttgttcaagtattttatc

SEQ ID NO: 485171 - DNA, 122 bp, Homo sapiens
gtgactttataatatcagtagagttgattagaaataaatagtgaggagtaaaaatggttacagtcattaaacatagggtatgtaagaaaaagaagacacattgacaatttgaatgatgtagt

SEQ ID NO: 485172 - DNA, 122 bp, Homo sapiens
acatagctactacacacacccagccttcattgtaacaggtgagcccattgaaatgggctacaggaaatggagtgtgggcagaagtgaggacaccacctccaggactggcctatgaaagcctc

SEQ ID NO: 485173 - DNA, 122 bp, Homo sapiens
ctgatggcttctgagcaaaggttttaaagacaggggtcaatttcaggaaagcacaagttacaggcaaaatcataaatcaacatgtggagactaaacattggtttggcctaaaaaggtgggat

SEQ ID NO: 485174 - DNA, 122 bp, Homo sapiens
gctaggttggtggagccgccagagccgtgctcagaaggattctgaggtcctttgcagacacagtcagcaaggatgtcttgggccctcagtaacaagcagaggctggggcaggcccctgtgcc

SEQ ID NO: 485175 - DNA, 122 bp, Homo sapiens
taagtgcatgtgtgttatgtgcaatttctatttttagtaggaacgtggcaccaacagttacagcactgagtttgccatgggctactgtgtgacatgtgatgactcaactctcccacctcttt

SEQ ID NO: 485176 - DNA, 122 bp, Homo sapiens
gaaggactggcagtgagtgaggagctctgcgcccgcatccctcacttgttggggtgacaacagcacaccaactgcaaaggcccatgaccatgcttggcatcagcagcagccttgggcgtccc

SEQ ID NO: 485177 - DNA, 122 bp, Homo sapiens
aacaagagaagaaaacacttcaccatggagaagggacctagaagacggttgctgtttttacagttgcatgcaaaggcttttacaggaaaccagtgagtgctgggcatctcatttgcataagg

SEQ ID NO: 485178 - DNA, 122 bp, Homo sapiens
aataaataaataaattaagcagcaatgtttctcccagatgaggatagcagcatggagctacaggccctaaaatgagtcaaaggagaccactgaaagccagagctagatgtatggtattgctg

SEQ ID NO: 485179 - DNA, 122 bp, Homo sapiens
aatcaggagtttgctttttatttaattctttggcatctaaatgggtatctttgctgtttacagctgctaaactcatggaatctaacatcccctggccagggctgttgacatttgctgcaatg

SEQ ID NO: 485180 - DNA, 122 bp, Homo sapiens
gacctaggtgataggttgatttgtgcagcaaaccactatggcacacacttacttatgttacaagcctgcacatcctgcacatgtaccctggaacttaaaagttgatggggggaaaaaaaaag

SEQ ID NO: 485181 - DNA, 122 bp, Homo sapiens
gttctgattgcacaagcttggagttcaacaataaatggcttttcatttgtggtcaaaatacagctctgtattaggaacttaatcctaaacaggtttttacctcttgcaaagtttatagtggt

SEQ ID NO: 485182 - DNA, 122 bp, Homo sapiens
ctaatgcagagccttgaaggagttgacctgatctgcaggctgatggtagccccaggactacagcactgtgcatgagtagcattttggctgagccctttaatgtccacaaaaaaagctgtttt

SEQ ID NO: 485183 - DNA, 122 bp, Homo sapiens
acaaaaaggaacaaagccggggaggttccaaggtggccgaataggaacagctccagtctacagctcccagcatgaacaacacagaagatgagtcatttctgcatttccaactgaagtaccag

SEQ ID NO: 485184 - DNA, 122 bp, Homo sapiens
cttgccaatttagatgccctttatttctttcttatgtctgatttctcaagttaagacttacagcactatgttgaataacactgatgaaagtgggcatcattagtttctcaatcttaaatgaa

SEQ ID NO: 485185 - DNA, 122 bp, Homo sapiens
tcaagatggaccaatgacataaatatgaaagggaaacagtagaacttttagaataaattacagcagaaaactattgttttgtgtcctctcaggatggaaggatttcttaagagacaggggca

SEQ ID NO: 485186 - DNA, 122 bp, Homo sapiens
gtcttgaactcctgggctcaagtgatcctcctgccttggctttccaaagcacagagattacaggagtgagccaccacacccagctcatggatacaccttgaaaagcatttgtagattttgat

SEQ ID NO: 485187 - DNA, 122 bp, Homo sapiens
ttgccctaatattgagttatacaacttatttatactacaataatctactaagctgaactacagtcagggttggagaagattgctaggatatgtgaaagaatcactcttttatattatattga

SEQ ID NO: 485188 - DNA, 122 bp, Homo sapiens
gactagggagaaaagggggtgagggagatggagagaggctgatcaacaagcacaatgttacagtcacagaggaagaataagttctagtactctgctgcccaatagggtgactatagctaaaa

SEQ ID NO: 485189 - DNA, 122 bp, Homo sapiens
tccttggacaaatgtctgattccagatctgaggcagagaaactacgaagtgatcatggtacacttggtgtcttccccaaagtaagaagcactaaagaatgaatggaatgtatcaaaaggaca

SEQ ID NO: 485190 - DNA, 122 bp, Homo sapiens
ctatctaatggtgtctttgtgaaccagttcttgtggatcagagacagggggcttgatttacagcacttgccatttcccatggtgtaaatattcccatcatgggcaattcaagctatcaatgt

SEQ ID NO: 485191 - DNA, 122 bp, Homo sapiens
tttgggagaatgaaagatgaggggagagagagatgtgcaaaactatatggtgagcagttacaggagataactggtgacccaggggtctggggcttcccatgatgacagacacaaataaggat

SEQ ID NO: 485192 - DNA, 122 bp, Homo sapiens
tagctggggtcccattccagtttctgaaagccaaaaatctgtatattttttgcctggttacaatcagcaacctttgtcctggagagaaccagaggagacaaccaatggacagtactgctcac

SEQ ID NO: 485193 - DNA, 122 bp, Homo sapiens
agctgcaagctagtcctacctcctatccgccatcttaatccattgtgattaaatctattacaagcctcttatgggtaataacacagaaattggctatctgaatggtgaaaaatctaatccaa

SEQ ID NO: 485194 - DNA, 122 bp, Homo sapiens
aatcacaaggtcatcttggatgtgggcaaaccttgttttaattgcaaacaacttaatttacagcacattcaataatgaaccaacaggagagttgctgactttgtaacatatgaatatataaa

SEQ ID NO: 485195 - DNA, 122 bp, Homo sapiens
taaaagataaaagttaataaaactgttagtaaatgtcatctcactcattcattcagtatacagttcctgagaagctactccaccagatgttttaggcccagagatgagaagctctgattcct

SEQ ID NO: 485196 - DNA, 122 bp, Homo sapiens
gagtgagccaccgcgtgccagccccactgatggctgccggcaatgacagatgttattttacagaatgtgaccccagagatgtgacatgtatagttcctaagtgccaactgggaaagctgggg

SEQ ID NO: 485197 - DNA, 122 bp, Homo sapiens
ttaactgctaaaggagaacaaaagttaaatcaagcaaaaatcttaccaaattttcatttacaattccatcactggctgcaaaaaaggctaagatgtgagagatgaagtacttctcatctgct

SEQ ID NO: 485198 - DNA, 122 bp, Homo sapiens
atgaagtcccttatgcgttttctggccctcaaaatgaaatttttactctttatccatttacaagctctaaaattgtggctgagtgaagggatttgccttttgtgctctcttaaatcattgtt

SEQ ID NO: 485199 - DNA, 122 bp, Homo sapiens
taattgaaaactttaatttgttcctcattcttaggctagagctacttctagaccaaactacagcagatatctaaactctgagatttctttggtgcttctttttagtaatgtttaggccagga

SEQ ID NO: 485200 - DNA, 122 bp, Homo sapiens
ctggtcttgaattcctgggcttaagcaagcaaacctcggcctcccaaaaagctgggattacaggcatgagccatgatgtaaggcagtctgccagatcttgacagccattttactaaattagc

SEQ ID NO: 485201 - DNA, 122 bp, Homo sapiens
tgtttagagataccttgtttaacataccttgttgagtcattaagaggaactcacgggcaacagcactagagctcatccctgaaaaatgcttatctaacacatatgtttttacccatgaggca

SEQ ID NO: 485202 - DNA, 122 bp, Homo sapiens
cacgcccttgcccagcagaagtaaagtcctgtagctacacaaacctcatcaggtgaaatacagctcccctgaaatgtggacttcacagggatacctgggcattatctacacatattacgatt

SEQ ID NO: 485203 - DNA, 122 bp, Homo sapiens
tacagagaccatatgttgcttatatatacagaaaagaagctaaggttgttttttggagtacagtcatataccacataatgatggtttggtcagtgacaaacccacatatactatatcatggt

SEQ ID NO: 485204 - DNA, 122 bp, Homo sapiens
cagatcagtagacaggccaaaaaaacagaaaaaagcaagaagcctagttatctaatacaacagtagcagatcagtagacaggcaaaaaccagaaataggaccttatgttgtatgctgtataa

SEQ ID NO: 485205 - DNA, 122 bp, Homo sapiens
acatttccccaataaattcttgcaatcattagagagaagctaggggaccacccatgcttacaagagaaaggaggcattccctatgccttcatccatggcttgcttcagcattaccttcagac

SEQ ID NO: 485206 - DNA, 122 bp, Homo sapiens
gagggcaaacacaggcaaagcagcacaccgccatggtgcaacaaatggtcaagacaactacagcatgtaccttaatcatcatcctatgacctgaagtattgattcatcctctatctttccct

SEQ ID NO: 485207 - DNA, 122 bp, Homo sapiens
ggaatgttttctttcaatgtgctacatgtacagcaaaagtaaaatccaaataaacatttacaagagaaggctgaaaactcaagaccatcataccctgtggggaatttacaatctaaatataa

SEQ ID NO: 485208 - DNA, 122 bp, Homo sapiens
cagaactatgtaaggataaatttctgttgttcaagccaccaggtttgtggtcacgtgttacagcagccacaggaaactaatacaggggtatatggggaaggagatgaaatagggatgaattc

SEQ ID NO: 485209 - DNA, 122 bp, Homo sapiens
tccaaaaagaaaaggggggaaaaaaaaaaagaaacaacctcttcatgtttggtgtttttacagcaacaaacacaaaacacacagagggaggatgtgttttctaacagtcaaaactaaccttc

SEQ ID NO: 485210 - DNA, 122 bp, Homo sapiens
acagcacattggggtctggacctcctggactcaggtgatcctcctgagtagctgggactacaggcatgcactaccacacctggtgaattttttgtattttgagtagagatggggttttgctg

SEQ ID NO: 485211 - DNA, 122 bp, Homo sapiens
ggatgggctttcagtgtattcttgctcgttcctacctcattccccaaattagtactcttacagtcatttagacttaaacatattgagtgggtgaattgattttgtgatttttaaagtgatat

SEQ ID NO: 485212 - DNA, 122 bp, Homo sapiens
ttatcccatgatggtcacagaacggccttgtctgatgttgatgctctttgaagttgtttacagtcaacaggaggatactaaggcctagctgtgtgtgccaggctcctggatatcagtggcta

SEQ ID NO: 485213 - DNA, 122 bp, Homo sapiens
aactccaacacttcatgttaaagaggcactgatgagctcctgttaaggcagcacataacacagcactgtagttctcagtacaattagctggccttgggatttgagtacagcctcaaagataa

SEQ ID NO: 485214 - DNA, 122 bp, Homo sapiens
tgactcttgccttgagatctgtgtgacctaagacaatgctaatggagactttaaggacaacagcatattggatgaattcatagaccatatttgtgatggttaatactgaatatcaatttgat

SEQ ID NO: 485215 - DNA, 122 bp, Homo sapiens
attaaaccctcaaattcctaatatcacaatttttataagtttttttaaatgtttaaactacagtcaatggatattttctagcataagtaattaaaatatgttttggacaggtaccatagcct

SEQ ID NO: 485216 - DNA, 122 bp, Homo sapiens
tttcctggttattttttctattcttgccaccctgacatagatcttcagaactcaaatctacagactctaagattttcagagctggtggaaaccataaaattcaaccttctatctttatagat

SEQ ID NO: 485217 - DNA, 122 bp, Homo sapiens
tgatttttagatctcataaataactgagaacatgcaattggtgtgtgtattttatacttacagcacatctcagtttgggatggctagtggctgttacattgtacagctcagagttagagcat

SEQ ID NO: 485218 - DNA, 122 bp, Homo sapiens
aagcacatacttcacaggattgttgtaaggttaacacaaataatgcacaaagagagcccacagcactgcctgtcctgctcttggtacctggcaaatggcatggtccctatttcaagctgctc

SEQ ID NO: 485219 - DNA, 122 bp, Homo sapiens
ggtcagcacttgcctgctgcatgtgctactcagtagctgccttcctataattgcacgttacaagacagaagtgccatttagggaccacagagcaattactgtttcttctaaagagagctggt

SEQ ID NO: 485220 - DNA, 122 bp, Homo sapiens
agaacagaggataattagaggatgggaagggtagaggaagggggataggatgcagaattacagccagatgaaagaataagttctagtgttctatagcactgtgggatgactatacttaacaa

SEQ ID NO: 485221 - DNA, 122 bp, Homo sapiens
ttgggaaacagaggcggtgtggaggatgggtcaagagagaatcagaaggcagatgatttacagcaatccaggccagatatcaggagggcctactctaagattgcttttagcatagctactgg

SEQ ID NO: 485222 - DNA, 122 bp, Homo sapiens
accactgcacctggccagtcagctctttttgaaagctctcaaacacagaagggctgattacagcagagcattatggaacaatgtggcctgactcccttctgaggagacctccatccagctcc

SEQ ID NO: 485223 - DNA, 122 bp, Homo sapiens
aagactgcactgcgtgctggaaaagtgctggggtgcatcttaagtgttctcaccaaacaacagccacctgtgtgaggtgacagatatggtaattagcttgtgattatttcacaatgtatact

SEQ ID NO: 485224 - DNA, 122 bp, Homo sapiens
atcccagcattttgggaggctgaggcaagaggatcacttgaacccaggagtttgaggttacagtagccatgattgcaacactgaactccagcctggatgacagagtgaccccctcccccctc

SEQ ID NO: 485225 - DNA, 122 bp, Homo sapiens
aggaactctgacttcagtaggatttggttaacagtctatagaacagaggttggcacactacagcccatgggctaaatccagcctgctgcctgttgttgtaaataaagctttattggagcaca

SEQ ID NO: 485226 - DNA, 122 bp, Homo sapiens
tcattgtagtgaatgcctattttatggcttttgatggcatcagggcactcaggtcatttacaagagtagtgtgtgagaccctgtgtgtcactgccactcatcttggccttcggccactgctg

SEQ ID NO: 485227 - DNA, 122 bp, Homo sapiens
cctccaaaccccagaatggtactgccactgacagcttggaccatgcacctggcaatgccacactcaaggccagcccatgaaagcagccaggaagggggctgtaccctgcaaagccacagggg

SEQ ID NO: 485228 - DNA, 122 bp, Homo sapiens
agctggggtgagatgtgagccagagaaggctttgtcaggactgtgtcccagaagaaaatacaggacttagtgtaccagtgatagggacctgtgaatccaaggcctcctagaaagtcctaatt

SEQ ID NO: 485229 - DNA, 122 bp, Homo sapiens
agactatagacagtgcaaggattcttgaatctgtgagcagagtggtgcataggctggatacagtctgttgtggtagaatacagttgagggtaccacattgcatttagttgattttttgtttg

SEQ ID NO: 485230 - DNA, 122 bp, Homo sapiens
gtcctggatccctgtgctgtgtgtggcctaggcacttggtgccctgtgtcccagccactccagccatggctgaaagtggccaacatagagcttgggccatcagttcagagagtgcaagcctt

SEQ ID NO: 485231 - DNA, 122 bp, Homo sapiens
gcctgtagccctgactagctctgtctgttaaatttgttactattttgattttctttattacaatcaatttagttatgacagctgttatcttttggtgatttttgtattgtgatagagtctta

SEQ ID NO: 485232 - DNA, 122 bp, Homo sapiens
caaggcttgatgacattgcaatataactggttgtgtgaggaagaaaggggaacacaattacaagtagacattgtaggcaggatatggtgcagtagacagaggtcctccaaataccaggaagg

SEQ ID NO: 485233 - DNA, 122 bp, Homo sapiens
gcaattgcattccatttcagtgctgtcccatttagtgatagtattaactacttcacactacagcatggcagaggaagaccaagccataagggtgttattgccatccaaccagtgggtgatcc

SEQ ID NO: 485234 - DNA, 122 bp, Homo sapiens
ataaccatacctccatgttataatcagcagaatgtgggcagaagtgatataggacatttacaggcctgcactataaaaacctgcagtgtgctagcctccccacctgaggtcctagagcgata

SEQ ID NO: 485235 - DNA, 122 bp, Homo sapiens
acagcacccgggcatgagaggacacacacagcacccaggcaggatgagaggacacacacacagcacccaggcatgagaggacacagaaagcacccaggcaggagaggacacacacacagcgc

SEQ ID NO: 485236 - DNA, 122 bp, Homo sapiens
agatagaattgataggtagattggtaggtaggtaggtagatagctgtagattttcatctacagttcctggctcataatccccatggcccttgttacagtcttttgctataatgttggctgtg

SEQ ID NO: 485237 - DNA, 122 bp, Homo sapiens
cagtttctaattggcatgtgtaggctgctctgtgactgaagaattttcaaaccagctttacacccttcaggaaaaatcccttgtgattggatgtttactatctgccaggaaactggtactca

SEQ ID NO: 485238 - DNA, 122 bp, Homo sapiens
tttggttgtcacagcttggtggggaggggccagggttgctgctgagcactttacagtgtacaggaccacccaaaaggtcagtgatgaggtggagaacccatggtatatgttccttatacatg

SEQ ID NO: 485239 - DNA, 122 bp, Homo sapiens
gtgctgattggtgcgtttacaatcctttagctagacacagagtgctgattggtgcatttacaatcctttagctagatactgagtgctgattggtgcaattttacagagtgctgattggtgcg

SEQ ID NO: 485240 - DNA, 122 bp, Homo sapiens
tgttgtgcagtttctcttgagatactagctttgtattctcatccagtcagtcagggcctacagccaggtgatgcagtaaaaccaaggatgtgcatagtgctcatttggaggtgagcgctatg

SEQ ID NO: 485241 - DNA, 122 bp, Homo sapiens
agggtacatggatggcacatggtgtgcccggggcctgtggctgcacaggtggccgcggtacagctcctgtgtgcctggtcacccatagagccagagtccagagagggagtgtcctctgtcct

SEQ ID NO: 485242 - DNA, 122 bp, Homo sapiens
ctgcaaaggttttagtttgtgttacagctatgatcttggggtaactgcatggctgtgttacagctatgaacttggggtaactgcatggctgtgttacagctatgatcttggggtaactttgg

SEQ ID NO: 485243 - DNA, 122 bp, Homo sapiens
tcactccacaacgtggctgagagtctctgaacaacagcagcaggttgggccttatgactacaagcactgtcttatctgtaggtaacagctgttgggtgagatttcatggtgtataaaaagca

SEQ ID NO: 485244 - DNA, 122 bp, Homo sapiens
gcaccttcaggtggtagagccatcatggcggatatggccatcgacacagtccctggtttacagccaaatgcctgtggtgatggtattgagtgttctgatgaaccttctgagtggccacacat

SEQ ID NO: 485245 - DNA, 122 bp, Homo sapiens
ttctaatgccaaggggctagagagcaaagccagaggcctggtaccagcctgccagagctacagcacctagcccaggagtgctgagccaagtgttggccacctaaaatcttccagagatgaag

SEQ ID NO: 485246 - DNA, 122 bp, Homo sapiens
actttggggtgggcattgaaatgagatggatttttcctgtttacatcaaaaggtgaactacaggacacagagacagtttatgcacagcctctgtgagctgctaaagctgcagtagcttatca

SEQ ID NO: 485247 - DNA, 122 bp, Homo sapiens
caatattaatgactgattacaagagtagtcaatacattgattaccattaatattggattacaagagtgccacctcagagctccctgaagaaattatgtaaaacatggtgtatgcactgtatt

SEQ ID NO: 485248 - DNA, 122 bp, Homo sapiens
gtttttgtcttggactggccacatgttgcccttagctgcatgtggctttagctgtccttacaggcaggctattccaggggcagaggtgaccacccttgtaaccctgagcttccagctcctct

SEQ ID NO: 485249 - DNA, 122 bp, Homo sapiens
ccaaagactgagatgctcagagccaccatgcccagctcaaggctttgcacttgtctcttacagctctgtgacacccaggatgaagtttctcagactctggctggtggggtaacaaatggctt

SEQ ID NO: 485250 - DNA, 122 bp, Homo sapiens
ctcagtgtaagatgcagctttggagggctttatgaggaattttaaaagtggcctttactacagctgcaaatgcatgaatgtgtcatgcatttgtagctgtagaattattaaacacttgctcc

SEQ ID NO: 485251 - DNA, 122 bp, Homo sapiens
gttcatgaatttccaaaagtgtgatgatcattagatgcaatatcagtgaatatcagcctacagcaggtacaccagagaaacaaatgcatgaaccaaaggcactggtacctcgtgctgagatg

SEQ ID NO: 485252 - DNA, 122 bp, Homo sapiens
acaagtttgctccagtattctgtgaaaaacctgggctagttcctacatgacaaatagttacagtacctgcctgcccacagcctggatagaagacccagggaaggcctaggtagcctcgtttt

SEQ ID NO: 485253 - DNA, 122 bp, Homo sapiens
atatcaatcggaagtgtgtcagggatggctgatgttagtcctgtcatggatttttaactacagcctatgagttggaagttgtaattattgaaggcctttatctaaaatgactttgcaaaata

SEQ ID NO: 485254 - DNA, 122 bp, Homo sapiens
tcagtagtcagaaatgcaaaagcctgaaaagatatctcaaaaggcctattttaggttctacaatagtgatgttgatagagacacaaggcaggaaaattctgggcagaagagggtgggtcctc

SEQ ID NO: 485255 - DNA, 122 bp, Homo sapiens
atgccactctatgatattttttatagaaaaagccccaaggcctggttgtgcactcatctacagcaacttatacttcagcctgttaaagcacaactgtttattttgcagtggcttctaaaatt

SEQ ID NO: 485256 - DNA, 122 bp, Homo sapiens
actgctgtaaagagcttaatagaatggtggccagcattaaattcactgattgattatctacaggcagtgaaagagagagaaatgtccaatgtgattcctgagtctctggttggaacaattat

SEQ ID NO: 485257 - DNA, 122 bp, Homo sapiens
ttgagaaaaatagggaagtgtggggtagtgaaaaattggagacaagggctgaccttgccacagttctctagacaaagcccaacaaagccctagattctgcccagagccacaccctgggcagg

SEQ ID NO: 485258 - DNA, 122 bp, Homo sapiens
gcctgcttgttgattggactaaaaatctgctaagttgtttattttggccattaacaattacagtacaagggttgtgagtctatgtcacatggtcattaaaactagctgtgtttgctgaaaag

SEQ ID NO: 485259 - DNA, 122 bp, Homo sapiens
cccagaagtgtagcagaagatacaagatcctgggtcagaaatgaaggattttgtgatttacagcacagcaagcagcagtggagtttggggagcccactgcttttccaacaagcagaaagtta

SEQ ID NO: 485260 - DNA, 122 bp, Homo sapiens
ttgatattactttagtttctcagtcaacacaaactactgggatgctaaacaaacaaagaacaagcagtgaccctaaccctaagtgccattttctgagcaccagctatgtgccagtttccagg

SEQ ID NO: 485261 - DNA, 122 bp, Homo sapiens
tgtttggattaaaaggccacagggagcggtcccggtccttgtgtaagaattttgaccccacagccctgcactttggctgtgtgtaatgaaaaaggttgggatggtcaggtgcgttggctcac

SEQ ID NO: 485262 - DNA, 122 bp, Homo sapiens
aagtcgctgtagagagaggtggccagagaatgaggggaggtggccctctgacaggtattacagtaactacaactgatggagcctcaaggtgccaagggagtgccatataggagaacctactg

SEQ ID NO: 485263 - DNA, 122 bp, Homo sapiens
tgcttggagggtgttggcatgaggaagctggaggctgatcagctcactgcaggtgtcttacaggattgctttggggaacctatttggctttctctgattggtcccatgttggaagagggagc

SEQ ID NO: 485264 - DNA, 122 bp, Homo sapiens
tactgctcatgatcctgcaagaccagcttgctgtgaggagagccaagctgagggcatgtacaggccatgtgcatgctgttcctgtggcataagcaaggccatcaggagagggggggtcagaa

SEQ ID NO: 485265 - DNA, 122 bp, Homo sapiens
gtcgtagaaaaattcaactgctgactaaagagcgctgcgtaatcagcagtgataatcatgcagtacttgctgtgggccttggatgagactcagagctgggctgaattcaggtgtgaactagc

SEQ ID NO: 485266 - DNA, 122 bp, Homo sapiens
ttgggtgaggtctggtgaaaccggcagcagatcaagagagagaaactggaaagagttttacagttttgttgtactcacagtgcacaaagaggaacatggcacaccatgcagggccactcaga

SEQ ID NO: 485267 - DNA, 122 bp, Homo sapiens
gccgcactgagaagacaagctacttccaggacattgttgggacatgttagaaggactttacagcatatttccatatgtatcagggagaaacaatgtgctgaaggatgattctcaaaggcgga

SEQ ID NO: 485268 - DNA, 122 bp, Homo sapiens
tcttcctttgtctttgatgatgttgtgtttttggagagtgaaggtccattgttctatttactgcccctctatttgaacatgggaaaaggaagcagcacccctgagggggctcccactcacca

SEQ ID NO: 485269 - DNA, 122 bp, Homo sapiens
gaatccttgagactctgtcttcctctcagggagcttagaatctcattaagatgctctctacagcacctcatacattggctgtcatatagcaggtgcttaataatttttgtttgaattgagtc

SEQ ID NO: 485270 - DNA, 122 bp, Homo sapiens
tttgaggtcattataaaataaaataccggttatttgaatacgagcactgcaatactgccacagtcattctgatgcctgaggtggttgactatcaatcaatgactgactaatggttggtagtt

SEQ ID NO: 485271 - DNA, 122 bp, Homo sapiens
tcagtcactcatagaataagactctgggattgactttcatcaatctcagccctaaggctacagcagataagggcctccttcaggtcagacatggaagctatcaggtcatttatatgtcactt

SEQ ID NO: 485272 - DNA, 122 bp, Homo sapiens
atcattcttcattaagctgagaacactagtggtgggagagagggtaccattaacactttacagtacttagtgatcagctggcaagcttcctgactaggttagccaacctcactacctggaag

SEQ ID NO: 485273 - DNA, 122 bp, Homo sapiens
ttataagctataactctttattgtgttattttattggttgctttggggtttaacttacaacagtccaccttcaaggtgtgttacactacttcacacagtttaagaactttacaatagtgtac

SEQ ID NO: 485274 - DNA, 122 bp, Homo sapiens
agcactacacttagttgtccattttgcatggaaagagaaatgagaagatatttgattatacaccaactcatgggcatgttcaatggtttctttggatgatcaaggacttggagaaaacataa

SEQ ID NO: 485275 - DNA, 122 bp, Homo sapiens
atccaaaccatgacaagtttaaaaatgaaaaagggcagttttaatgccagttaagaacaacagtcataaatgagttctgacaaactgtgacacaggatcactgcatatttgatcagagtttt

SEQ ID NO: 485276 - DNA, 122 bp, Homo sapiens
ctagaggctgcccacagttccttgccacatgggattcccagcatgccacttgcttccttacagccagcaggggtgagagacactacaggaagatggacactgaagtcttatgtcataaactc

SEQ ID NO: 485277 - DNA, 122 bp, Homo sapiens
gaggccttcccatccagctctacgtgatttggctgcacttgaacactgattgtccatttacagccctcagcaatgtgccttctaaatggcatgacatatgtagatgtgctgcagcgcttgtt

SEQ ID NO: 485278 - DNA, 122 bp, Homo sapiens
gctgcaaagtgtagggaagagaggacgatggaaagaggttggttaataaatataaaattacagccagacaggagaaataagttctagtgttttatagcactatagggtaattatggttagcc

SEQ ID NO: 485279 - DNA, 122 bp, Homo sapiens
aatgggggagtgcatgctgattggtttgtgagtgtgcaaaaaatgctaaaacaaaagctacagtcaaaggtgggtacaatagtgtaaaaaacaattagggaagagtagctatatgtaaaata

SEQ ID NO: 485280 - DNA, 122 bp, Homo sapiens
cagtgctttgtgtgagcgtgatatgttttaatttgtgttgtttattcttttttatgattacagttgactcttgaacaatgtgggggcttggggcaccaaccccctgtgcagttgaaaatcga

SEQ ID NO: 485281 - DNA, 122 bp, Homo sapiens
aggtgttttcaaggggccggagatcaaagatatgggtctggtgtcagcctcctggggttacagcatacagcccaagtgtgctgagctgaactcaggcaccccaaaagtatctagaaaggaag

SEQ ID NO: 485282 - DNA, 122 bp, Homo sapiens
gtgagctcccaaaagaagcatgtcctcagctctaacgctgtggcagataccaaaggcctacagctagagaactgagtggtgcacattcttgatggccttgatgcagttccatctgggatgtg

SEQ ID NO: 485283 - DNA, 122 bp, Homo sapiens
agacctgcctgtgtatggagcagagagggacctgctacaccatgtttatgtcccatgctacaccatgtccatgtccatgaaggatcaggcagctcaggctgctggtccaggcaggtgggtgc

SEQ ID NO: 485284 - DNA, 122 bp, Homo sapiens
ttccctaccccactccagggcaggtgctccaatctcttggcagagactaaaatgcttccacagccaggctgctaggttgacaaagaatggctgactgtgtatgcatctggatttaaaatggc

SEQ ID NO: 485285 - DNA, 122 bp, Homo sapiens
tcaaaaaggaagagagacagccaggattgcaataataattatactggagaatacttggaacagcacctaccagcaatctgctgggactcatgaaagtcatgaagatgaattcagcatgtgtt

SEQ ID NO: 485286 - DNA, 122 bp, Homo sapiens
cagctcagggctcaggggaagctggctgcatttaaaggactgaggcactgcaaaatgttacacccctaaactgtggagatattggccaaagctcctttcaggagtggcaagagctgtgtgtc

SEQ ID NO: 485287 - DNA, 122 bp, Homo sapiens
ctgctatcccaagggctggaggcacaagagcctagaaaggaggaggtgcaatcggggttacagccaggctagcaggagctagagtttagaggaaaggcagccagcacctgcgacagagaaag

SEQ ID NO: 485288 - DNA, 122 bp, Homo sapiens
atgtataagacactgtgccagggactatttgagtgcaaataggccttactttgttcattccaagacacagattttctgcacatttctgcaagaagtatggtttttttattgttttttgtttt

SEQ ID NO: 485289 - DNA, 122 bp, Homo sapiens
ctcgaactcctgacctcaggtgatccacacccaccttggcctcccaaagtgcggggattacaggcatgagctactgtgcctggcccacataaggtttttgatggcatgcttaccaaagctgg

SEQ ID NO: 485290 - DNA, 122 bp, Homo sapiens
atgctgttaactttcccgagttaataatgatgacgatgatgatgatgcagattatgataacagcattctgaaactctgaagtgttttcccaatggttcatatgtgtaggacaagttattaac

SEQ ID NO: 485291 - DNA, 122 bp, Homo sapiens
ggaaccccagccctcacctactctcagcccacgtagttccaggggagccaatgaaacctacagcccagaggtagaatgcaactcaggcatggccacagggactgattcagaatggggcacag

SEQ ID NO: 485292 - DNA, 122 bp, Homo sapiens
tgtgtgtatgtgtgcatgtgggtgcaggtgtgtgaggtgaagagactcagtggagggtaacaggcaactaaactaaaagaaagcatgtacaaaattccagattagggaaaccatggcaatca

SEQ ID NO: 485293 - DNA, 122 bp, Homo sapiens
aagctcagcagagtctgatatatagtggagattcagcgggattagcactctttgcctttacagcagtcccctgcagcacctgatggatatgctttcactctagattccaggcagaaatccct

SEQ ID NO: 485294 - DNA, 122 bp, Homo sapiens
tggctcatcaattttgtaatacaccagtgtttttagcaatggctcttattctgaagtctacagcagcagaccacaacagctgagaacttggctgttgaagtcaaaccaaattggattctaaa

SEQ ID NO: 485295 - DNA, 122 bp, Homo sapiens
gtgctgagcagcaggtgaatctgaggaatcctgtggttgagatgaccagatgcagcaatacagaccctacaaaccaaggcaatggcagcaccatgcactggtgctagcacatgcccatatgc

SEQ ID NO: 485296 - DNA, 122 bp, Homo sapiens
gactagaagcaggtagtgtgcgtagctctcacagagaggaatcaaaggggtgagtaaatacagtaccttcattgaaacatccaggtacatgcattgggactaatcaaggaaacaacttgacc

SEQ ID NO: 485297 - DNA, 122 bp, Homo sapiens
gctggatggttctcgctcaaggtgactcaggaaattcagtcaaaatgttggccaggactacagtcataggaagatctgactggagccaggcaatttgcttccaacacagctcacatacatga

SEQ ID NO: 485298 - DNA, 122 bp, Homo sapiens
ccttgcctgagttgttcacttcttcacctgtcgtctttgtttagagcaatgtctggcatacagtaggtgctcaataatgcttgttgaatgaatgacaataagagccctgtaaatactgttat

SEQ ID NO: 485299 - DNA, 122 bp, Homo sapiens
tattgcctttatttggagagcaagtataatttaaggaggtggtcatagattccaagtttacaagcagtgaagttgtgttggttaatgataagtgtcaagttgactggattgggggatggcta

SEQ ID NO: 485300 - DNA, 122 bp, Homo sapiens
atggctgagagacacaggcactggagagaggagagtcagagaggaactgattcaacacaacaagcaatgcttctgagtagagttatgagactctcacttcagctcatctgctctggatgagc

SEQ ID NO: 485301 - DNA, 122 bp, Homo sapiens
atctcgaactcctcacgtctagtgatccgtctgccttgacctaccaaagtgctggtattacaggcatgagccactgtgcccagctgggactgaggtcttaccctgggcctgtattgctctat

SEQ ID NO: 485302 - DNA, 122 bp, Homo sapiens
aatctgtccaagtgaataagtggtgaaattggctaggtgaggtggctcatgcccgtaatacagcactggcattgcctgtaatccctggggcaaaggtcagatgattgtttgaggtcaggagt

SEQ ID NO: 485303 - DNA, 122 bp, Homo sapiens
gaaggctgtacaggaaccatggtgccagcatctgcttctggggaggcatcagggagcttacagtcatggtggacagcaaagggcaagcagacatctcacacagtgggagcaggagcaggaga

SEQ ID NO: 485304 - DNA, 122 bp, Homo sapiens
tttagataactaaatcgacaacaaatcacagtctgccatatggcacaggccatgcctctacaggacaaatgattggtgctgtaaaatgcagcatttcacaccttactagcattctttgtctt

SEQ ID NO: 485305 - DNA, 122 bp, Homo sapiens
gcttgtgtctttgtaactatgctgcagggcttcctatctcaggtgcctcagtatggattacaggcttgccaagactgatctcttcagcccttgttgtgaaatgtgcattgtagtttgtcatg

SEQ ID NO: 485306 - DNA, 122 bp, Homo sapiens
caaaagaaaaaaattggctgggtgtggtggtgctcacctagtgctgcttgactaggactacagtcagtagtagaaaggaggctgaaataagaggatcccttgagcctagaagtctgaagctg

SEQ ID NO: 485307 - DNA, 122 bp, Homo sapiens
tgcagtgtgtgagagttccttatcctcaccagcatttattattttctgtcttcttgataacagctgttttaactgggatgagatggtatctcattatgattttgatttgcatttccctaacg

SEQ ID NO: 485308 - DNA, 122 bp, Homo sapiens
aaaccagatacagtagtctctcttatccatggctttgctcttcacagtttcagttatctacagtcaaccatggtctgaaaataggtgagtacagtatactaagatattctgagagaccacat

SEQ ID NO: 485309 - DNA, 122 bp, Homo sapiens
acaaatataaggcaacgtgcagcagcaacaacactgctgattttttactgccccagactacagccatctagctcagtggaaatataagtcagtttgctaaggacatgcttcctacagtctta

SEQ ID NO: 485310 - DNA, 122 bp, Homo sapiens
gggaagatcttccttcccaagggcctgagagccacgctgataacatcttttctacctccacagtcacagagcacaatagggagaaggggtactggttctgaacagaatgggttcccttcata

SEQ ID NO: 485311 - DNA, 122 bp, Homo sapiens
gcctggccttattgagtcaaaaatataaaaatattaaaagtttataaaataaaaaagttacagtaggctaaaattactttgttattgaataaagaaaaatgtttgtatcaatatagtgtagc

SEQ ID NO: 485312 - DNA, 122 bp, Homo sapiens
atctacagtcagtgattaaagtttaagatcaggtaggtggcggccgagcacggtggctcacacctgtaatgccagcactttggaaggccaaggcaggtggatcacctgacatcaggagtttg

SEQ ID NO: 485313 - DNA, 122 bp, Homo sapiens
gaagtttacactgataataaagagcataaaagggaagttaacaaaacttgcatctacgtacaagacagttgaaagagagaaatagaaacaaaccaactgattgacctaggctggaaaaaatg

SEQ ID NO: 485314 - DNA, 122 bp, Homo sapiens
gcacaatctggggtttaacttgggttcttttcttggctgtggtgctcacctggcaatctacagtcaagtagttgcctgacccaagacaaatatctccttgtggatgtgcctctgccaggctt

SEQ ID NO: 485315 - DNA, 122 bp, Homo sapiens
gcagagtatccacatgatgcctgaagccaaaaccatttcagaaaacagcagtgcagtctacagtagtgtcagactctccagagtttcaatccactgcagaacattctagaacactgacttca

SEQ ID NO: 485316 - DNA, 122 bp, Homo sapiens
cagcccaaccacatcatcctacagcagaagttctcagtgcactccttggagaagcagcaacagcacctgggaacttgctggaagtacaaattcttgggcccactggacctacttgaagcaga

SEQ ID NO: 485317 - DNA, 122 bp, Homo sapiens
ttgggtctcagtgaagtcaatacatgaaaggaggctaggtacggggagctgtcgcccctacaccccaagagcagaaacttagcagagccaggagccttggcctggctgcccatcagggtttt

SEQ ID NO: 485318 - DNA, 122 bp, Homo sapiens
ggcttttcacttttcaagtgaagccactgcaatggaagtccactctggcacaacagactacagtcccttactagaaaacagcatatttcaatgtattttgacttggggtggcccagtgtgac

SEQ ID NO: 485319 - DNA, 122 bp, Homo sapiens
cagcctgggcgacagagcaagactccatctcaaaaaaaaaaaagccatgggacctgcctacagtcacaggccaacaaggtggcaggtccaggatttgaacttagagcagtcgagggcctgtg

SEQ ID NO: 485320 - DNA, 122 bp, Homo sapiens
tctgtgcctttggaggcagttactggagcttgtaagctggacgcagcacctgctaggtaacaggctgtgacctgggctggggatcccatagccagcacaatctctgtcatcctactcacctg

SEQ ID NO: 485321 - DNA, 122 bp, Homo sapiens
atgtatgcctggtgaagatgtgaacatcgttgaaatgaaaacaaagggttgaggctattacataaccttagttgataaagtaggagcaggatttgagaggttctattgtgggtaaaatgctg

SEQ ID NO: 485322 - DNA, 122 bp, Homo sapiens
tggagttcttctgtagggaaaatgtgccacttcttcccccttcatttatttaatcatttacagtcacacattgcttaatgatggggatacattttgagaaatgtatcattaggtgattttgt

SEQ ID NO: 485323 - DNA, 122 bp, Homo sapiens
tgtgacagtcttgtccggggacaacttgtctaggttgctgtggccttcgagtagagacaacagcacttgcagatgggatgacagagacatgacagaccctgtcttcctggaggcagcaagaa

SEQ ID NO: 485324 - DNA, 122 bp, Homo sapiens
tggaagctcccacaccaggtttcgaatcatagtgagaggcagtgcagaacccagtttttacagcagggcagcagcaggaacagcagttccagtgccagcatctggagctcagtgtcatgcca

SEQ ID NO: 485325 - DNA, 122 bp, Homo sapiens
caacatggcaaaaccccatctctacaaacaatacaaaaattagcccagaatggtggtatgcacctgtagcctaagctactagggaggctgaggtgagaggatcacctaagcctggggaggtc

SEQ ID NO: 485326 - DNA, 122 bp, Homo sapiens
caaccccatttttagacactggagacctgggagctcaagtgatccccaggagattttgtacagtcccatgattttagatgccatttctatgctgaggtcttctgtcatgaagggctggactc

SEQ ID NO: 485327 - DNA, 122 bp, Homo sapiens
atgcagaccccagattcatagacccaccaagagctttgtaccctccatgggtaaaaactacaggcactcaacaccagcacagcccatgaaggcagctgcatgggctgaacactgcaaagcca

SEQ ID NO: 485328 - DNA, 122 bp, Homo sapiens
gttaccacgtttatgaggcatttgaggcagcctgtgagcctttgtatcaggttttccaaacagtcagtcaaaatgctaagtgatgcaatgtaattatgtggttttgtgagctttgggatagt

SEQ ID NO: 485329 - DNA, 122 bp, Homo sapiens
agaataacagtaaccatttttagagcatttacaatgtgctgagtgcttctcatgcatttacagcaacactcagcaggtattattatcatccctaggaaagagaggctcagagagcctcagta

SEQ ID NO: 485330 - DNA, 122 bp, Homo sapiens
ttcttgaactcctgagctcaagcaatctacctgcctcagcctacgaaagtgctaggattacaggcatgagccactgcaactggcctgtattttgagtttgtttactatttcattggtcttgc

SEQ ID NO: 485331 - DNA, 122 bp, Homo sapiens
tcaccagtgtgagttctttgatgctcaataaggtgtgatttccaactgaaggctttcccacagtcactacatttatggggtttctcacctgtatgaatcctttgatgtttaacaaggctcct

SEQ ID NO: 485332 - DNA, 122 bp, Homo sapiens
ctttttctttctactgtctctgccatcatttcatgcaacaaatgtttgaagtcagctttacaagagtaggcattttctgatctacatgcctgtgtgtttcactgaacacccacaaccatatg

SEQ ID NO: 485333 - DNA, 122 bp, Homo sapiens
cctgggcaaggcaatggggaatatggtggtaagatatgatccttgtcatttagggttttacaagcaatgtgattgttagcacttgcaccaatggtgaactgaggtgggatagtggtggaagg

SEQ ID NO: 485334 - DNA, 122 bp, Homo sapiens
aaattgctgtataatactcgtttattctcgttcattaaatctcatgctgttagacatttacagttttgtcatttctcattattgtaaacagcaatgcatggtacatttttgttcataaatct

SEQ ID NO: 485335 - DNA, 122 bp, Homo sapiens
tgggagcattctgtatcttccttctagctacttgaaatgatataatttattgttgaactacagtcattctacagtgctgtagaacattagaacttatgccttctaagtaatttttgtatcct

SEQ ID NO: 485336 - DNA, 122 bp, Homo sapiens
tctgtggtttaagccactcagtctgtcggattttgttatggcagccctagcaaacgaatacagtcacttcaatgatctcttcagatatggatggttaggatccaaagtggcccctggctcct

SEQ ID NO: 485337 - DNA, 122 bp, Homo sapiens
acagccacatgtggctagtggctaccctattggacagcacagactacaactacaggtttacagcactgaacagaaagtcagtgttttttggaggtgtagactgaaacaatgaggtgagaatt

SEQ ID NO: 485338 - DNA, 122 bp, Homo sapiens
ttttgaggtttgagggttgctgggttttctttcccaatcataaacaatgtttccattctacagcccttctctagggaagacccataaaatttgactcatgaagagagagaaaaaaattcagg

SEQ ID NO: 485339 - DNA, 122 bp, Homo sapiens
acatactctgaaatctaagcaaagttttccaaaccttaattcttgacttctctgtacctacaggctcaaaaacatatgtaagctaccaagatttggggcttgcaccctctgaagcaatggtc

SEQ ID NO: 485340 - DNA, 122 bp, Homo sapiens
ttgactgaatgcagccttgacctccctggctaaagcgatcctcctgggtagctaggactacagtcatatgccaccacaaacagttaaattttgcattttttgtagagaggggtttcaccatg

SEQ ID NO: 485341 - DNA, 122 bp, Homo sapiens
gaccttcctttcatgtagtttcctgtctattgaaggagccaggcagtaaatataattgtacagttacttatataattacagctgtggtaaggattatacctttgtgttctatttgttatatt

SEQ ID NO: 485342 - DNA, 122 bp, Homo sapiens
taggctcaagtgatcctcctgccttggcttcccaaggtgtgggattacagaggggagccacagcacaccaccaagttaagggatttttaccaaagccttcctgatagcattgagacaggaat

SEQ ID NO: 485343 - DNA, 122 bp, Homo sapiens
aacttgtcagattttactaagataagcaatttactgaaaagtgcctcactaacatatttacagctcagaggacaggaacttgggaaagttctgtgctcatggctatgtttgcgcaaagcaac

SEQ ID NO: 485344 - DNA, 122 bp, Homo sapiens
tcagaaaatgaggtatgaatcagttgcttctataaatcaatattcatgtcttagtccatacaggctgctgtaacaaaacaccagaggttgggtggcttataaacaacagatatttatttctc

SEQ ID NO: 485345 - DNA, 122 bp, Homo sapiens
gacacggtgaaaatggacagttaactttgatttttatgaaaacagttgtgacttcatctacactcctccctcaaagggtcttaggacctcagtggtccatggagaccatgctttgagactgc

SEQ ID NO: 485346 - DNA, 122 bp, Homo sapiens
atctaccattcattcactcattcaatctatatttactgagatcctgtagcacatagtctacagcagatctatatgaagggcaacttggtatgggccagggtcatcctcacagacctgataat

SEQ ID NO: 485347 - DNA, 122 bp, Homo sapiens
agagcagtgcaaccaggacctgactgtggcatggctgggtttatgttatccctagtattacaggaaccctgaactatcagtgtaagacctggttctggtctggaggcctctgtttggatgag

SEQ ID NO: 485348 - DNA, 122 bp, Homo sapiens
gggacagttgggatgggcaggagagggctggggagatgttggtcaaaaaatacaaaattacagttacataggaggaataagttcaaaggatctattgtacagcatggtgattgttaatgata

SEQ ID NO: 485349 - DNA, 122 bp, Homo sapiens
caggtggattgatgagactcctccagtggaccagccctctcggtttgggaataaggcatacaggacctggtatgccaaacttgatgaggtgaggctgccacaggacaggccagggactgggc

SEQ ID NO: 485350 - DNA, 122 bp, Homo sapiens
aggggctgtgctgtgactcagacagtccctcgggctgctggggtcaagcaaacttaaccacagcatcaccagccacaggaaactgaaccccaggcctagagtgacatgatgtcggcatggaa

SEQ ID NO: 485351 - DNA, 122 bp, Homo sapiens
gcagaggaacagggcattcctaactgagaagctgttaataatcagggatggatgctagtacaccttgttaaatgatgttcagctgtgtagtgtgcaggggcatcctggacctaaacttacag

SEQ ID NO: 485352 - DNA, 122 bp, Homo sapiens
cccagtgggttcgttgtctcgctggcctcaggagtgaagctgcagaccttcacggtgttacagctcataaaggcagtgcacacccaaagtgtgagcagcaacaagatttattgcaaagagcg

SEQ ID NO: 485353 - DNA, 122 bp, Homo sapiens
gggacacccatcaccaggaatgaagtcctcaagccccagctctgtccacagtgtttcttacaggaattggctctgagtcattgcataagctcctctggggtgatgaggcctttcctaataag

SEQ ID NO: 485354 - DNA, 122 bp, Homo sapiens
cagaggcagaaccaggtggcaagctgaaatcggagtcctgaaaaaataaaaaaggccacacagcccactgagatcctcctggccctacattccccagaggcatacattaacgtgatgcagtt

SEQ ID NO: 485355 - DNA, 122 bp, Homo sapiens
tttagctagacacagagcgctgattggtgcgtttttacagagtggtgattggtgcatttacaatcctttagctagacacagagtgctgatttgtgcatttttacagagtactgaatggtgcc

SEQ ID NO: 485356 - DNA, 122 bp, Homo sapiens
aaggcctatttgtaatgggagattggattagtaataacatttgctcttcacatttggttacaggacctgcactcagggtcctgggaataatcctatcactcatctcagtaataagataacct

SEQ ID NO: 485357 - DNA, 122 bp, Homo sapiens
gtcacaggaaaagcaatttttaaaaatccaaacctacattttgagataactatagatttacaggaagttgcaaggaaagtactgagaggttgcatgcacccttcacatgggttccccaaata

SEQ ID NO: 485358 - DNA, 122 bp, Homo sapiens
tgagtggaaacctggcctgggtggcggtgggtagctcgggattcagcttgtgcaggacaacaggaattagaagtatactccaggcaaggcaaagaaccaaagccaaactctgcactccaaac

SEQ ID NO: 485359 - DNA, 122 bp, Homo sapiens
tgaagacttattgatgtggatgcatgttcatcatgtgccattaagtcagtatgtgagttacaggatagtacatatcatttgattctgttataaacattacccagggaaaaatgtctgaagat

SEQ ID NO: 485360 - DNA, 122 bp, Homo sapiens
tcaggcctagcagcactcattctcagcaggggacacagtccatgccctgctgtgggactacagcatgtgttaaggcaaagctacacatgcagtcaacacctatcaccctcagaatcaataca

SEQ ID NO: 485361 - DNA, 122 bp, Homo sapiens
gcccacaaggatgtggagcagcgggaactgtggctcatgctggcattccacaacaggctacagctattctggaaagtgcttggcagtttcttttgaatttaaaaatacacttactgtgtgat

SEQ ID NO: 485362 - DNA, 122 bp, Homo sapiens
tagtgatatggacaatgaaatccaggctgaggtgggtctcagatggagatgaggaacttacaggaactggagtataggtcactcatactatgtgttaacaaagagacaggtggcattttgct

SEQ ID NO: 485363 - DNA, 122 bp, Homo sapiens
agtgtttcattgtataaataacaaacttgaaatttaatcaatgcttccattctgggggaacagccaccagcatcagagagctaacagctctgacacctggacaggctgcaaactgcccaggc

SEQ ID NO: 485364 - DNA, 122 bp, Homo sapiens
tatagattatgatttgttaagtgtgcctttgaaaaagaaataaagaaaaaaattaaaaaacagtacttgtaatatggttgcattttgtttgtatacttgcaagaagggatgactctagttgg

SEQ ID NO: 485365 - DNA, 122 bp, Homo sapiens
tttcattattatgagttgtggcaattttgcaattagaatagagcagatagattgtgcctacaggactaacaaaaggtgagtcaggttttcataggctggcttggaactggaacagactagtc

SEQ ID NO: 485366 - DNA, 122 bp, Homo sapiens
ccagaagaagtgagagcatctttcacgatttttcttccggaaactgacttgatgttgttacattcaacagtaggcagcagatgttttagccagagaactgtaagtgctctggtttcagtctc

SEQ ID NO: 485367 - DNA, 122 bp, Homo sapiens
ctatggagtttgaataagaaggaagaaggtggaaatttgttacgtgcagaagtttaactacagctaggatgtttgaattttaaaactgcagttgtttgagcaaacaaagcttagaaggattg

SEQ ID NO: 485368 - DNA, 122 bp, Homo sapiens
gggggagtcgtgggcacagtaaagtggaatttaatgagtaccggggcagtggggggttcacagctgcctacctagctgttttatggattaggttccatgctagattttgtttgaaagccact

SEQ ID NO: 485369 - DNA, 122 bp, Homo sapiens
gttccagctactgaggaggctgaggcaggagaatcactggaacctaggagtatgaggttacagtgagctatgatggagtcatatgatggagccagcctagatgacagggtacgaccttttct

SEQ ID NO: 485370 - DNA, 122 bp, Homo sapiens
aaacactgagattgctccaaagctgccacgggaatcccaggagtgccaagtcacaacgtacagccagcactcaagggggagaggaacctatgctttcagaatactgagagggaacattgctg

SEQ ID NO: 485371 - DNA, 122 bp, Homo sapiens
tggagaacaatcactggggcaccagagctgaaaaaagaaatgagtaatacattttgcctacagtaatgtgctagaaatcagtggaaaagtaaattattgtgatggcatagttgtcattagtt

SEQ ID NO: 485372 - DNA, 122 bp, Homo sapiens
gatgcaagaagtaggctcccatggctttgggcagctctgcccctttggctttgcagggtacagcatcttcctagctgctttcacaggctgatgttgattgtctgctgctttttcaggcacac

SEQ ID NO: 485373 - DNA, 122 bp, Homo sapiens
gtttcgaactctggacttcaggtgatccatctgcatcagcctcccaaagggctgggattacaggcatgagccactgcacctgactgctaatcagtataattttaaaagcttatgaaagactg

SEQ ID NO: 485374 - DNA, 122 bp, Homo sapiens
tctctaataattaacatcggtgtacttgggaaatagtctctaaaaaataatagccctttacagcaattcttgttgatgcatcagggcagaggtttaggtttagcctcttgctgtcatttatg

SEQ ID NO: 485375 - DNA, 122 bp, Homo sapiens
tggatgtggattagtccaggctgggtgtttgagaaggcagtagagactcagatgtgtttacaggctgataagaaagcccctttaggctgggtctctactaaaactacaaaaattagccaggc

SEQ ID NO: 485376 - DNA, 122 bp, Homo sapiens
tgaattttaaaagctgcccaagtagtctgtgtagccaggactgagtccttgtttcatctacagtcaagcagctgtgttaagggcattggggtcagatccaaggaatgaagctctgtgaggca

SEQ ID NO: 485377 - DNA, 122 bp, Homo sapiens
taattgtggacttgcttgcttctcctttcagttttatcagttcttgcttcacttattttacagttatgctttttggtgcatacaaaaacttagaattgctatgcctttttggtggattgact

SEQ ID NO: 485378 - DNA, 122 bp, Homo sapiens
tccttcatcacacgtgcttctcatcgaaaccctggtttcaggatggatcaagtgctgttacagctcatgttccttagacctgatttgttttgatattttactgcctttccttttaatttttg

SEQ ID NO: 485379 - DNA, 122 bp, Homo sapiens
atggagatgcgtgtgtgtgtaacagccttagtttcctcatttgcaaaatgactgtactaacagtaccttgcccaagtgtggagtccctagaagtaggtcctgagataaggactcatgatgag

SEQ ID NO: 485380 - DNA, 122 bp, Homo sapiens
aactcattccagcgttaacacaaatgtaaaaggttcaacatctcatctgagaaaagtctacagtcccttttgcctatgagtccctgaatttcaaagggaggtctttttttcaaggtacgatg

SEQ ID NO: 485381 - DNA, 122 bp, Homo sapiens
agtaaagtagttaaatgaaatggtgatcacattgcacaaaggcatggctatgctatattacacttgcagagagagagagagatgactggtggaaatgattggctacttactgactctgggtt

SEQ ID NO: 485382 - DNA, 122 bp, Homo sapiens
caacagataaaagtttgagaacttccaaattaaaagaccagaagaatatagttgcttgtacagcacaaagcctggaggtttgcaggcaccaatgagatagcactatctgtgtaaggtgtggt

SEQ ID NO: 485383 - DNA, 122 bp, Homo sapiens
agcgaacataggcagtagccagggactggttacagcaggccttgggtcagggactggttacagcaggcctttctgagacacagtgctgtgctggcttcaggtctgacccagtgcagtcatag

SEQ ID NO: 485384 - DNA, 122 bp, Homo sapiens
agagccatgataattacaaactatatggtgaatattgaaaatggtcacgcagtgtttgcacagcacactctggctgggatgagggattgtgcacactgagtatccacaggtgagaaatcaaa

SEQ ID NO: 485385 - DNA, 122 bp, Homo sapiens
aagggcacaggtgccaccttgggcagttgtaactatgtgtgcggccatacagttttgctgcaccaccttcctgatctgattaaccttattagttagcaaatggagagcaacttgggtgtaat

SEQ ID NO: 485386 - DNA, 122 bp, Homo sapiens
aatccagtaaataggccttcagtaattagtggtaaggtctgagggagggaaaatattctacagtcctgtgattaagcctcagtcttgtaatgagcctgtgcccctgggctgtgaatttcaca

SEQ ID NO: 485387 - DNA, 122 bp, Homo sapiens
tatcactgaagagccttgtgatcactcttttctgcaggccagactttaccgggggaactacagtcattcacttggaaagcttaatacagtgggagtgattggatcctggagtggcaggggcc

SEQ ID NO: 485388 - DNA, 122 bp, Homo sapiens
caaagaaaaaagagaggtagggcaaggttgaaagtctggcaactgaagagcaataacttactgcaactgctggttgtaaaaaggtcatgatgaattcatacttcattcaggcaagtgctcat

SEQ ID NO: 485389 - DNA, 122 bp, Homo sapiens
gagttggagaagcaagagcagaagagggaaccaggacattctgtgcttcccaggaaggaacagcacttccctgcagagccctgtggagtgccactgagaggacaggagaagtaacaaaggca

SEQ ID NO: 485390 - DNA, 122 bp, Homo sapiens
aaaatgagttataagtaccacctgttaaaagtgaagagattaacagtaggaaggcaactacaggagcttcatgtgcctgttaatcatgttcttaaagcctgggaactatgttcactctagaa

SEQ ID NO: 485391 - DNA, 122 bp, Homo sapiens
gaagcagcagggagatacccaagcaactataatgcttggtcccatcgcatctgggttttacagcacttggccaagctagatgtcaaggtaggaatattactgtctcctgggcagactgcctg

SEQ ID NO: 485392 - DNA, 122 bp, Homo sapiens
aacatatccttgagatagtcccaggcaggtccagaggtacagtctgggagctggggactacagtctataacctgagaagttgatatagtttggatatgtgtccctgcccaaatctcatgttg

SEQ ID NO: 485393 - DNA, 122 bp, Homo sapiens
ttacggtaagaaatcaagccagagtacaacagaaagtgatttgggcagagacgtaagttacagtcaacactgtaggacagtgtggtgggcagaaattgtagagatctgtgaactgtaggcca

SEQ ID NO: 485394 - DNA, 122 bp, Homo sapiens
tttttagggctgagaatttctagctcctggaatgctcagagaatgatctagaaagaactacaccatgcaatccagtagccactaggcagacagttattgagctcttgaaatgcagctgatct

SEQ ID NO: 485395 - DNA, 122 bp, Homo sapiens
aaaagggctaaaactgtgccaagtgccagagtccactggaaatttctgaatccagctgcacacccagatgtgcatgttgacaggatgccaagccattccaaagtcttgagcaatgcgcagtt

SEQ ID NO: 485396 - DNA, 122 bp, Homo sapiens
gtcaggctggtctcgaactcttgacctcaagtgatccacccactcaaagtgctgggattacaggccagagccactgtgcctggctctggctaactaactttgatatgtatgtaggaccacat

SEQ ID NO: 485397 - DNA, 122 bp, Homo sapiens
accggagactaatatagtgatttacatttcagaatgatcatttggttattttacagtgaacagtcaccaggtggtggcaagagtgaatgcagaaaaaacagggcagtcattccagtattgga

SEQ ID NO: 485398 - DNA, 122 bp, Homo sapiens
ctcatcttttacccagtggcatgccacactccactcatctttccctgtcccttaaaactacagcagcagacatctggaagtgactaaaatagcaatgactcctagcccagccaaggttctat

SEQ ID NO: 485399 - DNA, 122 bp, Homo sapiens
gtgaaacatggtgctggagtttgcagtctaagctcatggctagatgagtagtgacttaaacagcaggtctgctttcagaatgtattcctgcagagagttaagctgcattcttttaaaacgga

SEQ ID NO: 485400 - DNA, 122 bp, Homo sapiens
atcagctggagaagagctgagctacctttggtacttctggtacacctggtatccctgctacacctggtcccctggcacacctggtgccttgtacatctggtacccctgatgtgaatagtccc

SEQ ID NO: 485401 - DNA, 122 bp, Homo sapiens
catttcatataccactgtaagggtcatttgaaacacagcatctgaagtacatactttttacagctgctaataattaaatataaaatattgggagaggacagtgtctcttatgtcagaaatac

SEQ ID NO: 485402 - DNA, 122 bp, Homo sapiens
gaccaagatcaatgcactggtgatttgttgttggtgaggatctgcttaatggatcacagacagtcatcttctcactgtgtcctcacatggcagaaaagaactagagaactttattttttttt

SEQ ID NO: 485403 - DNA, 122 bp, Homo sapiens
cagatttttgggagagaaaaatcagatgatacaactggtttagaagggggaagaaatttacaatccatggtgcctgtagagattgaggctaatgggaagagagtgttctgccttgcagaact

SEQ ID NO: 485404 - DNA, 122 bp, Homo sapiens
agaggtggagagcaaccaaatggccatgtctaagacagccttctgctgtaaagggttctacaggacatgctgtacaggggaaagcactggccaccataagactttgagcacttgaactgggg

SEQ ID NO: 485405 - DNA, 122 bp, Homo sapiens
catttatgacgggtgggctggctagttggggattatgtagtacccccagcccaggtgccacagtacatacagcaacactggggcaacaccactgtgggataggtacctgtcacaatcagatc

SEQ ID NO: 485406 - DNA, 122 bp, Homo sapiens
ttttatttatttaaaaaaaagaacctcaaatagtagcaccttagtccattgttttgcttacagcctttgccaattaaacctgcatctgggaatggggtctagatatggcaaaactgttgcag

SEQ ID NO: 485407 - DNA, 122 bp, Homo sapiens
taggaattggttcacatggttatgaaagctcaaaggtcccatgacctactatgggacctacagcttgtagctggagaaccaggaaagccagtggtataattcagtctgagtctgaaggctga

SEQ ID NO: 485408 - DNA, 122 bp, Homo sapiens
gaagttgaggtagggctgagggcagcttggtgctggcctgcaggtgccccttggcacctacagcctaggcaccatgaacagcagcaggaagcagacaggcttccctgcaaaagggggtgggt

SEQ ID NO: 485409 - DNA, 122 bp, Homo sapiens
aaaaaagtgaaggggaggggaggggagggaaagggaggggaagggaagggagttcagttacagcaccagctaggtgaccataccttgcagggctgaggcaaggctccccaagaagccgtgta

SEQ ID NO: 485410 - DNA, 122 bp, Homo sapiens
gaagggggagtattatgcttcagaggcagaggctcatggaaaacctctactagaagagtgcacctgtggctttgcaggcttcagcccccatgtctgctctcatgggctaggctggtgtggag

SEQ ID NO: 485411 - DNA, 122 bp, Homo sapiens
gagaatgcttacccattgcctgcacaagcattgtaccttggaagtagttaacttgctttacagttcagaggctcatgtgcctaagggactgtagccttgtgtcagatgagactttaagcttt

SEQ ID NO: 485412 - DNA, 122 bp, Homo sapiens
gctgggtacctggagcctgaggctgactgtccctccctgtgtcttggaggagaggccttacagcccaagaaaacccccagggcctgacctctgggcacacatgcaggaaggaagggtctgtg

SEQ ID NO: 485413 - DNA, 122 bp, Homo sapiens
agagatggatacacttcttgggaattttttaagctatggaacagtaaaaagagatggatacacttcttgggaattttttaagctatgaattaatggtgcataagtatactcttcactgttaa

SEQ ID NO: 485414 - DNA, 122 bp, Homo sapiens
aggcagagggatgatgtcttccagaaggaatatctaagaagcttgcatgtttgacagaaacagcagctatgaagcctgcaaatttgaaaaaaagaaaagaaggtgcaaaaggtaagacactt

SEQ ID NO: 485415 - DNA, 122 bp, Homo sapiens
aaaaaggtcattgataatgtggaagattcagggagaaaaaaaaacacttaaagcaatgtacaggccaaaatagcagtgtagaagcaagctgccttcactccacctgagagaacaaaaaatac

SEQ ID NO: 485416 - DNA, 122 bp, Homo sapiens
caaggaggtaaataatgggtaaagtgaagaaacctggaataaaagctatttcaactgatacaagaactggtcccacctgggctttcctttatgaaaatggccaggaattatagtaggaccaa

SEQ ID NO: 485417 - DNA, 122 bp, Homo sapiens
ctgggcctacacagtctttcaagaacagaacatccttgcccagcagagatttgaattctacagcaaatggctctaaggagtattgtcaggcatagggacaccatcaggctggcctaggtggc

SEQ ID NO: 485418 - DNA, 122 bp, Homo sapiens
gacatggttttaggaagagcaatccctgagacttgagtggtgacaatggagacaaccacacaggaatgcaagtctccagtctggctctgacctactttattgctggggaataacattccctt

SEQ ID NO: 485419 - DNA, 122 bp, Homo sapiens
cagtaagggagccttgccaaatgcttgtgtcattttccttttagcacaacctacatattacagatcttcaggtgaggtatggcacagcaatctgattcaaagtttgagaacccatgccttaa

SEQ ID NO: 485420 - DNA, 122 bp, Homo sapiens
gaagctgtgagaagagagccaacctccagaacttggaatggtagatccactgaaagcttgcaccatgtgtctggaaaagccacaagcactcaatgccagaccttgaaagcagccatgggggc

SEQ ID NO: 485421 - DNA, 122 bp, Homo sapiens
ctgctaattgtagagccccagggccttgagtgaacataggcaatagccagggagtggttacagcaggacttgactgagaaccagtgttgtgctggcttcaggtttgacccagtatagtcata

SEQ ID NO: 485422 - DNA, 122 bp, Homo sapiens
ctatttacttttgtagaagaggactttttctgaagatgtatctacgatgttggttgggtacagcactttggcattgattcaagatgtgtgcaatagtgttgtctctgtatgatttcttcagc

SEQ ID NO: 485423 - DNA, 122 bp, Homo sapiens
ctaaatgtaaaactattgaagaaacagtttatgtgcaaggtgtgtaagaaaagtaaaatacacctttggcaaaaggattgtaaggagccataagaatgtgaatttttacctacgttaaaagg

SEQ ID NO: 485424 - DNA, 122 bp, Homo sapiens
gttgattgaataacatatgccaggccctgtgctagctgcttaatctactgataagaaagacagtcactgtcctcaagtaattcacaatccagttggcagaaagagacaattaaaatgcagct

SEQ ID NO: 485425 - DNA, 122 bp, Homo sapiens
gcactgaattccaaacaataaaaataaaaaataaaaaaaaaactgggccaaagaaatgaacagtcacttcaccaaagaaaatatacagatggggcttggcaccatggctttgggaggctgag

SEQ ID NO: 485426 - DNA, 122 bp, Homo sapiens
aaagatcaagttaaatctgtcaagcttaactcttgatgacccagaatctgtctctttttacagctatccagctgagtgaaagtggaagtgactctgatgtgggatctggtggaataagaccc

SEQ ID NO: 485427 - DNA, 122 bp, Homo sapiens
caaagtcacaaagccggcaagtggcaacatctggatttcaacccatgacatgtggctctacaatctgttacctagtgctctattctgcctgcattctggtgaattagttgaggtagacttta

SEQ ID NO: 485428 - DNA, 122 bp, Homo sapiens
ggactactagatcatttcaccaagtaggcggacaattcagattgtctgaatgacaaactacagtactggaggtgaggagtgatgacttcttgtgagatatgacccttttcttgagggaacac

SEQ ID NO: 485429 - DNA, 122 bp, Homo sapiens
cagccagccaaggctgaccaaagctgttcacagtcagtctaagctggtcaaaactggttacagctggccagagccaatcaaagctggtcacagctggttagaatcagttaaagcccaccatg

SEQ ID NO: 485430 - DNA, 122 bp, Homo sapiens
aaacactgagatcaccacagtgcttcagtgggcagtccaggagtgccaagccatgatctacacccagcactccagaggtagaggagccactttcagagcattgaaagggaacatggattcaa

SEQ ID NO: 485431 - DNA, 122 bp, Homo sapiens
agaggagcaacggatccagcaaggcttctctgttgagattcttcttggcctctctgtgtacaatttgttcctcctaggtatggggcaagaaccctgtctctggaactagagtctttaaggga

SEQ ID NO: 485432 - DNA, 122 bp, Homo sapiens
aaacagacaaatagactaatggaacagaacagaaagcccagaaataaatccacacatttacagtcaattgatgtttgacaaaggtgccaagaacacacaatggggaaaggacagtctctttg

SEQ ID NO: 485433 - DNA, 122 bp, Homo sapiens
ggtagtctccaaaggccttgggaagctccaccttagtggctttgtagggatcagcctatacagttgctctcaagggctagcattgagggcctgcagcttttccaagcatgtagtgcaagctg

SEQ ID NO: 485434 - DNA, 122 bp, Homo sapiens
tattcaacccaggagatctagtactagcccagattgggaaggcctcggtggtgaaagttacaggaatcaacacctggatacatcacacttgagtcaaagcctgaaaagctgggggagcaacc

SEQ ID NO: 485435 - DNA, 122 bp, Homo sapiens
tctaagtggcaaagcatacgagaggaagcagaacacaaatgtttgaaaaattcgcagctacaggatgtgtcagaaaagcaaatcccattttggagggataaattcaagcctgctacagaaat

SEQ ID NO: 485436 - DNA, 122 bp, Homo sapiens
tttggaacttcctagagacttattgaatggctttgaacaaaatgctgatagtgatatggacaataaagtccaggctgaggtggtctcagatggaaatgataaacttgttgggaactggagca

SEQ ID NO: 485437 - DNA, 122 bp, Homo sapiens
ttaaatcagagtcagcttattagtgggccaattatgcgaatgatagcccaatcatatttacaggtctcaaccatactcagaaggtgaggggattatgcagggtgtttatatcagatgacggt

SEQ ID NO: 485438 - DNA, 122 bp, Homo sapiens
tgttgggaggttgggcctaatgaaaagtcattaggcaatgaatgtagaatgaatggattacagccattatcacaagtgtgagtttattatctcagttgtgggttgactatgaaagggggagt

SEQ ID NO: 485439 - DNA, 122 bp, Homo sapiens
atgatactggttgtgggtttgtcataatggttctcattgttttgaggtattttccttttacagaaccttagttcattgagctcttttatcatgaagggaagttggattttttttaaacgcat

SEQ ID NO: 485440 - DNA, 122 bp, Homo sapiens
tgcaaacaaagcaatgaaaggatgaagcaacaaaagcacagatttattgaaaccaacgtacactccacagaatgggagtgggcttgagcaagcagctgaaaagcactggttacagaattttc

SEQ ID NO: 485441 - DNA, 122 bp, Homo sapiens
atttctcccatttggaatgggagcatttacccaatgccaactaacttggttttgattttacaggctcataagcaaaagggacaagccttgtctcagatgaaactttggactttgacttttga

SEQ ID NO: 485442 - DNA, 122 bp, Homo sapiens
gagtgtgatgctatgctatttccaggttgatggtgtcagatagtatcaaatgttgagttacaggacacacagctgctgtccactgcagaattggttgctgatagggagaaatctctacatat

SEQ ID NO: 485443 - DNA, 122 bp, Homo sapiens
agtagaagtctgaatgaagaaaggtaaaatgccatgtggatgtctcagggaaggaaattacaggcagaaagaacatcatgcaaactcaaaaaggtaaaaatgaatttgttatgattaaggag

SEQ ID NO: 485444 - DNA, 122 bp, Homo sapiens
acagggcgtgcttttaaacaggaagtaaagaatgtcatctttatgggagccaagtcattacagccttcattttggtggcagggtctcacctcaggatcagtgtcaatctgtgtgaaatccaa

SEQ ID NO: 485445 - DNA, 122 bp, Homo sapiens
ttcatctctaccatcctcttcctcaatgtgaagggctgttgagtgagtacccttagggaacaatactggggaagtataaaattatcatcctccaaataagaagctgctggttccattgtgtg

SEQ ID NO: 485446 - DNA, 122 bp, Homo sapiens
agctgtctgatctatgttgcaggtgtagagtggagaactggacgtgatgaaacaaaactacagcacaaggctagttgcaaggccctggaacagtctaggagaaagagttgatggtagcttta

SEQ ID NO: 485447 - DNA, 122 bp, Homo sapiens
ggtctcaaactcctggcctcaagtgatccacctgcccggcttcccaaagtgttgggattacaggcatgagccactgtgcccagcctggattatatttaggtgagactttggacttaggcttg

SEQ ID NO: 485448 - DNA, 122 bp, Homo sapiens
cagtggcctatacttcatggtttaccttcttgaggacttcagagggcagagcctgaagaacagtcaaagatgcaattaaggccatttgcaaaaagcatgcatgttctggacttgctcattct

SEQ ID NO: 485449 - DNA, 122 bp, Homo sapiens
gtggctacagaaaatatgtgtataaatggacatgaatgtattccaatgaaactttatttacaagagcagatggccagccagatttggcccacagccatagtttgcctacttctagcctagac

SEQ ID NO: 485450 - DNA, 122 bp, Homo sapiens
agcttgaaaagtgtagaggaaagcagtaggtgagaaagtgtaaagcaaatccttgagttacagcactatgattacagataaggcttatgggtcatgcttctttgactatgtccttggaagga

SEQ ID NO: 485451 - DNA, 122 bp, Homo sapiens
taagtgactgagccatggtcatccagctagtaagtggtagaaataagatttgagccccaacagtctggctcctgggccagtgtgctcatgccattccttcaattcaactgaaagagatgcac

SEQ ID NO: 485452 - DNA, 122 bp, Homo sapiens
agtcaaagctataaattatgttgtgtgtgtatgtatgtatgtatttttactttttatctacagtcaaagtatgatgaacttaaaaaatcagaaaagggaagtaaacagcaacataaagttca

SEQ ID NO: 485453 - DNA, 122 bp, Homo sapiens
ttgctgattatagagccccagagctttgagcaaacatagtcagtagctgcagagtgattacagcaggccctggatgagacccagtgatatgctgtattcaggtctgacccagcagattttta

SEQ ID NO: 485454 - DNA, 122 bp, Homo sapiens
cagtcagttaccagaatgcaaatatttgaaacacatctcaaaagaccaatcttagctctacaatagttatgttatctataggagcaattggggacatcacaaatcatgtgacatctggcaac

SEQ ID NO: 485455 - DNA, 122 bp, Homo sapiens
tctattgtttataaattagccagtctctggtattctgttatagcagcacaaaatgaactacagcagaaatcaagtacagtattatatagctgagaggttgacaaaacacagcacataggctg

SEQ ID NO: 485456 - DNA, 122 bp, Homo sapiens
acatatgaatttggtaattaagtttttaacacataaaatttggaagacacatttaaattacagcaatgggcaagttggtaaatgctatgctccttattaatttcatctgcaaaatgaagaca

SEQ ID NO: 485457 - DNA, 122 bp, Homo sapiens
gactgaaacttccactcaatataccacaagccaaaaatcagaaattttattgaccagatacagttagttgcagggggagaggacagttgagcatcacaagaagcaaaaagcaagggctggaa

SEQ ID NO: 485458 - DNA, 122 bp, Homo sapiens
taaaattaggatttttaaaaactataatgctcaggttttatttctcagttttgccatttacagtttgtgtgatcttggagaagcctgttaagtcttatgttctttatctataaatgatgaag

SEQ ID NO: 485459 - DNA, 122 bp, Homo sapiens
aactcaaaaaaaattaaaagatatttaggagaacagactgaccactaacaatcatgtttacagtcccctggaaacatcatggtgtttcattttttgttgcctttagaatgacctaccctcct

SEQ ID NO: 485460 - DNA, 122 bp, Homo sapiens
aaccagcgtgtagaattgtctgatgtgatggatgtgttgatcttagccctgttatggctacagctcctgacaaatgacactgtctagcctgtggatctccattggctaaaattgttcagctt

SEQ ID NO: 485461 - DNA, 122 bp, Homo sapiens
acatcaaagagaccaatgttgtgggggtaaaatgggtgagacacacagcagcaggagatacagtcagaaaggtcacagtgggccagatcatgagaggcttgtaggtcatttccaaattgata

SEQ ID NO: 485462 - DNA, 122 bp, Homo sapiens
gggaaaggaagtcattattctagtgttcatattccttgtcacattgtttagggttgattacaagcagtaatcttgtttgtcagaaatacagccccaactcagctcacattagagcctggcat

SEQ ID NO: 485463 - DNA, 122 bp, Homo sapiens
tgtccttatagcaggtgatccagtcatcaccagtagtctctgtcagaggttgacaaataacagcccacaacttgcttgcctgtttttgtaagtaaagttttattggcatgcagtcacaccca

SEQ ID NO: 485464 - DNA, 122 bp, Homo sapiens
ttgaggtctttggaaacccagggcaacagacctaggcactttgcttgcagaaggtatctacagctttctgtatagtgacaacaataaaaagcctagaagataagactttgtttcaaaaaatt

SEQ ID NO: 485465 - DNA, 122 bp, Homo sapiens
aagaaaactggtttttaaaagcagcctgctccttcccagaagcaatgctcttttggcatgcagcagctgggaaaagaatcttccatgtacatgtctacagtcaaggagaatgccagctttta

SEQ ID NO: 485466 - DNA, 122 bp, Homo sapiens
catgtgggtcttgagtccataagggctagactggagtctaggttttcaggggtgttcatgcagtctcagttcataggattcaacctgacaaagcagtttcctggagtggttctgacctcggg

SEQ ID NO: 485467 - DNA, 122 bp, Homo sapiens
attaatgcttttaaatgcttagaactgtgtttggcatacctgaacgctcaacaggtattacagtaagtcctcacttaatgttgtctctaggttcttggaaactgggacttaaagtgaaacca

SEQ ID NO: 485468 - DNA, 122 bp, Homo sapiens
cactagctttaattactccaaacttttagtattaccctgagtaaatttagggagtctttacagcagtgcttcttaaactttaatgtgcataataggcacctggggatttgattaaaaataag

SEQ ID NO: 485469 - DNA, 122 bp, Homo sapiens
cctgtttctaaaaaagtgacaaatgggagtgttaaaccagtgttgagttttattgttttacagttaacatgaaattaagaaaaaaagaaaaggtaaataaatttgacctccccaaaattgag

SEQ ID NO: 485470 - DNA, 122 bp, Homo sapiens
cacacaataacccatgatgtattattatccccattttacagatgacaaaaccagtatctacaggggtaacataaattaaccaaagaacacaggtagtgagcttcacattttataaaggtgct

SEQ ID NO: 485471 - DNA, 122 bp, Homo sapiens
gtaacataagctgagcacagtatgctgggcatcaccttgagtatgtgacaatgagctacacaccacatgtggacaaggcatcagaaatgggcttatgcttaggcagaataggcagctctgta

SEQ ID NO: 485472 - DNA, 122 bp, Homo sapiens
agtggaccatctttgttattaaaataaaaagtgtggctaggaagaaaggaagaagcattacagtgaagtatgtcaattgccaccttggttccacatagtttgactttctggattgaatatca

SEQ ID NO: 485473 - DNA, 122 bp, Homo sapiens
ggaggaatttaatacagggaattggtggcataggtgatggaagaacagagaagaaaaatacagtacagtgagacaactcagaggttggcagtatgaagaagctgctttcattcctaagaagg

SEQ ID NO: 485474 - DNA, 122 bp, Homo sapiens
agccattggggtgggggtgaaacacccccaatattgtaaaagaaaggataggtgccagtacagtctcaaaaaaagaaggaaaatgccatagaaattctggattggactgagactgacactgc

SEQ ID NO: 485475 - DNA, 122 bp, Homo sapiens
acagggcatttattcactttcaatacacagtttggaagtttaaggaaccgagtaaatttacagtcactgttttgttgggggcccacagcaggctttcttgcatttgttctaagggagatgga

SEQ ID NO: 485476 - DNA, 122 bp, Homo sapiens
aacaactattcatgcgcaaaattacctttacaaggcctaaagaaaccaagtgagagattacagcacctgggtgtagcaaataaagaaagatgcatttaagagtggagaaagggcagatcatt

SEQ ID NO: 485477 - DNA, 122 bp, Homo sapiens
taagcctaaggccatagggattccctttatagggtagtaaatgggaggtgagggtaattacaccaatgtgtatggttctcataatgaaaactgtgtcacagtccaagtctttaatggcttgg

SEQ ID NO: 485478 - DNA, 122 bp, Homo sapiens
acccaggaggctttgtcatggggtgtctttatcctctaagtagttatttttttaattctacaggaagcaggaaattatggttgggatggatgaaaaggtgccacataaaagcgcagaaggca

SEQ ID NO: 485479 - DNA, 122 bp, Homo sapiens
tttgctacatttagtggcttaaaacaatatatgattgttatatattggttcacaattctgcaggttggcagtttagactaagcacagctgagtgattctttcagactctgctgggcagctca

SEQ ID NO: 485480 - DNA, 122 bp, Homo sapiens
atgcaagtagaagtatacatataccttgttgctgtaaaacaggtaatgttttatcctttacaggcttatgacaacttaagcttgagtgatcacttactaagagcagtactaaatctcttgag

SEQ ID NO: 485481 - DNA, 122 bp, Homo sapiens
accagagcccattgcatccaatgagagttgtgatgggggctgaagctccttgatgatctacagctctgagcacttaaaagatcacttgtcaaaaaggggtcacatggctgggcacggtggct

SEQ ID NO: 485482 - DNA, 122 bp, Homo sapiens
ttggggctcaattcccctatgaacttctagtaaatagtacaaaacagaggttgaaaactacagccatgagccaaatcagactcactgcttatttttgtaagtaaagtgttaatggaatagaa

SEQ ID NO: 485483 - DNA, 122 bp, Homo sapiens
cgtgacttctgagattaaccagacaggctctaaacagtgggacctattctgccagttttacagctaccatctgtgagcaaacacaatagaatggaaatggggtctccaggccatgacagtgc

SEQ ID NO: 485484 - DNA, 122 bp, Homo sapiens
agccatgatgacagcggccttttgccattagatgcagggagatggtggtggaagtggatacagcagtcagagaacatctggcagagacaaatatggaccacctgttcatacagaatacgagc

SEQ ID NO: 485485 - DNA, 122 bp, Homo sapiens
gatgacaagcagtttatttgcacttttgttagggctgcggtgacttacatgtctggcaagcacttctttgcaaaatgtgacaactgctgccatgaaaatgcactggttttaatgacaataac

SEQ ID NO: 485486 - DNA, 122 bp, Homo sapiens
ctcaagctcaattcacctagagtacttacaggactcagcatatagtcgtgcttgtggctacaatttattacagcaaaaggatacagaccaaaatcagcaaagggaaaaggctggtgcaagtt

SEQ ID NO: 485487 - DNA, 122 bp, Homo sapiens
attcacctagagtacttacaggactcagcatatagtcgtgcttgtggctacaatttattacagcaaaaggatacagaccaaaatcagcaaagggaaaaggctggtgcaagtttctaggagtc

SEQ ID NO: 485488 - DNA, 122 bp, Homo sapiens
ctgctctgggagtgtctgtcatatgcggttgagataaggcctgagatacgccctggttttctgcagtaccctcaggcttactagggtggggaaaaaacactgccctggtaaatttgtggtca

SEQ ID NO: 485489 - DNA, 122 bp, Homo sapiens
aggtgttgttctaggtttggagatagagcagggagcaaaacagaaatatcttggctctcacagtacttccagtttggaaaagaggcaacaatcaaaacagtctgtaagtgcaagagtttaca

SEQ ID NO: 485490 - DNA, 122 bp, Homo sapiens
gagcaaaacagatacaggcccagtacactagtatgtacattctagctggcacaggaaatacagcagtcttgccttagggatgaagcactgtaggcagagaagtaaaatacaggaaagagtca

SEQ ID NO: 485491 - DNA, 122 bp, Homo sapiens
gctaatgaagacatacctgagactgggtaatttatagaggaaagaggtttaattgacttacagttccacatggctaagcatgcctcacagtcatggtggaaggcaaatgaagagaaaagtca

SEQ ID NO: 485492 - DNA, 122 bp, Homo sapiens
agaagctaaagatatcgataacagctcgtggcaattatataacatataagtgttacagtacagtatatgctcataaggaacctgagtgactactctggattttgttgttgttgctgtttgga

SEQ ID NO: 485493 - DNA, 122 bp, Homo sapiens
gccgctgcactccagcctaggtgacagaatgagaccctgtttctttaaaaaaacaaattacaaaaggaaatctgattataaatggatccatgatttataggaaatttggaaggattagaaaa

SEQ ID NO: 485494 - DNA, 122 bp, Homo sapiens
gtccagggttcccctgctgtgtgtagcctcaggacttggtgcactgtgtcccagctgctccagcagtggctaaaaggagccaagctacagctcaggccattgcttcagagggtgcaagcccc

SEQ ID NO: 485495 - DNA, 122 bp, Homo sapiens
tacgctagaattgaacctggactgccattgtaaaatggcaaagcattagctgctgaattacagcactgggcagtttccattgctcttcccagaaggagtctaaagcagtcaattttgagttt

SEQ ID NO: 485496 - DNA, 122 bp, Homo sapiens
tttaccaaatgcctgtatccccaatgtatctaggaagtaaataacttggttttgattttacaggctcataggtggaaggcacttgccttgtctcaaatgagactttggacttggacttttgg

SEQ ID NO: 485497 - DNA, 122 bp, Homo sapiens
gcagatcttgccctgggtgcatgcacaggcttaagaccacgtggaagccaccaaggtttacagcttacactctctggaacaatggcctgagatgtacctggggcctttttaggtacagctgg

SEQ ID NO: 485498 - DNA, 122 bp, Homo sapiens
ttgtcttctgtgcacttgcaggataaataccacgtggaagttgacaaggcttatggcttacaccctgtaaagcaatggcctgagctgaaccttggccccttttagccatggctggagctgaa

SEQ ID NO: 485499 - DNA, 122 bp, Homo sapiens
aagtgacatgtaagcagagatttgaatgaaatgaagaagctttgatggtgaaaaatattacaggcaaaggtaatagcaacagaaagtttctttgttggaaaagaatttgatgttgttaaggg

SEQ ID NO: 485500 - DNA, 122 bp, Homo sapiens
aattgttaaatagaggtttatggctttgctaaaaaaaggatattggtgacatagaggatacagcacctagtttcctggtcatctgaaaaggtttctaagaggcagtaacatctgtttccagg

SEQ ID NO: 485501 - DNA, 122 bp, Homo sapiens
gaggaggtagaaattggcaggagataattgtatcctgcaatgtgagaagaacatgagatacaggaggccagaggtggaacaatatggtatgaatatttgtcccttccaaatctcacagtgaa

SEQ ID NO: 485502 - DNA, 122 bp, Homo sapiens
cagtgccagttcagctgcaatagaatagaacaacaggtagatatctaaggttccagactccaggccctgactcctggatgacacctccagacatgcccagagctgggggaaacccactgtgc

SEQ ID NO: 485503 - DNA, 122 bp, Homo sapiens
ctgctgattgaggagccccacggtcttgagaaaacataaacagtagccagggagtggttacagcaggacttggttgagacttactgctgtgctggcttcaggtctgacatagcagtcatagt

SEQ ID NO: 485504 - DNA, 122 bp, Homo sapiens
tgtatgtggtatgaatccagtaacaagatctatggccgatcaaacaacccatatgatttacagcatattgtaggtggaagttctggtgagttggacattttagtatggcatgaatagctatg

SEQ ID NO: 485505 - DNA, 122 bp, Homo sapiens
ataatcccaggataggggacccacccagggaaaagtgggattagggacccacataaggaacagtctaaccacttttccatgtatggctgcagtgtgctggggattcatgccactctgtaatc

SEQ ID NO: 485506 - DNA, 122 bp, Homo sapiens
cagtacatcctggaacagagctctcagagtaagaggcaggctgccatctttgctgtttcacagccttcactggtgatatttgcaagtatgagaaaaactgagatgactagtgtccggagtag

SEQ ID NO: 485507 - DNA, 122 bp, Homo sapiens
caagcctagataacagccgtctaggcttcatagataacagccatctaggatgtatagcaacagtcatgtgtaatcctgagttatgcacctgtcacaatttaattaactgcctttgttctgcc

SEQ ID NO: 485508 - DNA, 122 bp, Homo sapiens
agaaggaagagcaaaacaagaattaaaatgtaggatgaacattcagggagtggaatattacagcaaatgaagatatgaggctgtgtcagtcagcttgtttgcagttatactaaggttaaaaa

SEQ ID NO: 485509 - DNA, 122 bp, Homo sapiens
aaatggtttcctgggccaggaccagcaccttgctgcattgtgcagtctcaagacttggtgcactccatcccagttgtggctaaaaggggcaaacatacagctcagaccattgcttcagaggg

SEQ ID NO: 485510 - DNA, 122 bp, Homo sapiens
tttgcattggaccccactgaagactgtggaacaggtggagtgtcaagtagctctgctttacacttccttgttcaatcttgttgcagttgggtgggtgtgaagattcagctctccagtggatt

SEQ ID NO: 485511 - DNA, 122 bp, Homo sapiens
taatgctgctgataaagacatgctcaagactgggaagaaagagaggtttaattggacttacagttccacatgctggggaggcctcagaatcatgatgggaggcaaaaggcacttcttacatg

SEQ ID NO: 485512 - DNA, 122 bp, Homo sapiens
atttgaccttttgacttagggtttaatacattggcatattcccggggtcttgcatccctacacccttgagactttctttggggtgggctgtccccatgtgcactggcctgccagcacttgag
